(19) United States
(12) Patent Application Publication
(10) Pub. No.: US 2017/0007679 A1
(43) Pub. Date: Jan. 12, 2017

(54) CRISPR/CAS-RELATED METHODS AND COMPOSITIONS FOR TREATING HIV INFECTION AND AIDS

(71) Applicant: EDITAS MEDICINE INC., Cambridge, MA (US)

(72) Inventors: Morgan L. Maeder, Jamaica Plain, MA (US); Ari E. Friedland, Boston, MA (US); G. Grant Welstead, Cambridge, MA (US); David A. Bumcrot, Belmont, MA (US)

(73) Assignee: EDITAS MEDICINE INC., Cambridge, MA (US)

(21) Appl. No.: 15/274,728

(22) Filed: Sep. 23, 2016

Related U.S. Application Data
(63) Continuation of application No. PCT/US2015/022497, filed on Mar. 25, 2015.
(60) Provisional application No. 61/970,237, filed on Mar. 25, 2014.

(51) Int. Cl. A61K 38/46; C12N 15/113; C12N 9/22

(52) U.S. Cl. CPC A61K 38/465; C12N 9/22; C12Y 301/00; C12N 15/1138; A61K 48/00

(57) ABSTRACT

CRISPR/CAS-related compositions and methods for treatment of a subject at risk for or having a HIV infection or AIDS are disclosed.

### REFERENCE TO RELATED APPLICATIONS

[0001] This application is a continuation of PCT International Patent Application No. PCT/US2015/022497, filed on Mar. 25, 2015, which claims the benefit of U.S. Provisional Application No. 61/970,237, filed Mar. 25, 2014, the contents of each of which are hereby incorporated by reference in their entirety herein, and to each of which priority is claimed.

### SEQUENCE LISTING

[0002] The specification further incorporates by reference the Sequence Listing submitted herewith via EFS on Sep. 23, 2016. Pursuant to 37 C.F.R. §1.52(e)(5), the Sequence Listing text file, identified as 084177.0124SEQ.txt, is 2,093,238 bytes and was created on Sep. 23, 2016. The Sequence Listing, electronically filed herewith, does not extend beyond the scope of the specification and thus does not contain new matter.

### FIELD OF THE INVENTION

[0003] The invention relates to CRISPR/CAS-related methods and components for editing of a target nucleic acid sequence, and applications thereof in connection with Human Immunodeficiency Virus (HIV) infection and Acquired Immunodeficiency Syndrome (AIDS).

### BACKGROUND

[0004] Human Immunodeficiency Virus (HIV) is a virus that causes severe immunodeficiency. In the United States, more than 1 million people are infected with the virus. Worldwide, approximately 30-40 million people are infected.

[0005] HIV preferentially infects CD4 T cells. It causes declining CD4 T cell counts, severe opportunistic infections and certain cancers, including Kaposi's sarcoma and Burkitt's lymphoma. Untreated HIV infection is a chronic, progressive disease that leads to acquired immunodeficiency syndrome (AIDS) and death in nearly all subjects.

[0006] HIV was untreatable and invariably led to death in all subjects until the late 1980's. Since then, antiretroviral therapy (ART) has dramatically slowed the course of HIV infection. Highly active antiretroviral therapy (HAART) is the use of three or more agents in combination to slow HIV. Treatment with HAART has significantly altered the life expectancy of those infected with HIV. A subject in the developed world who maintains their HAART regimen can expect to live into his or her 60's and possibly 70's. However, HAART regimens are associated with significant, long-term side effects. The dosing regimens are complex and associated with strict dietary requirements. Compliance rates with dosing can be lower than 50% in some populations in the United States. In addition, there are significant toxicities associated with HAART treatment, including diabetes, nausea, malaise and sleep disturbances. A subject who does not adhere to dosing requirements of HAART therapy may have a return of viral load in their blood and is at risk for progression of the disease and its associated complications.

[0007] HIV is a single-stranded RNA virus that preferentially infects CD4 T-cells. The virus must bind to receptors and coreceptors on the surface of CD4 cells to enter and infect these cells. This binding and infection step is vital to the pathogenesis of HIV. The virus attaches to the CD4 receptor on the cell surface via its own surface glycoproteins, gp120 and gp41. Gp120 binds to a CD4 receptor and must also bind to another coreceptor in order for the virus to enter the host cell. In macrophage-(M-tropic) viruses, the coreceptor is CCR5, also referred to as the CCR5 receptor. CCR5 receptors are expressed by CD4 cells, T cells, gut-associated lymphoid tissue (GALT), macrophages, dendritic cells and microglia. HIV establishes initial infection and replicates in the host most commonly via CCR5 co-receptors.

[0008] As most HIV infections and early stage HIV is due to entry and propagation of M-tropic virus, CCR5-Δ32 mutation results in a non-functional CCR5 receptor that does not allow M-tropic HIV-1 virus entry. Individuals carrying two copies of the CCR5-Δ32 allele are resistant to HIV infection and CCR5-Δ32 heterozygous carriers have slow progression of the disease.

[0009] CCR5 antagonists (e.g. maraviroc) exist and are used in the treatment of HIV. However, current CCR5 antagonists decrease HIV progression but cannot cure the disease. In addition, there are considerable risks of side effects of these CCR5 antagonists, including severe liver toxicity.

[0010] In spite of considerable advances in the treatment of HIV, there remain considerable needs for agents that could prevent, treat, and eliminate HIV infection or AIDS. Therapies that are free from significant toxicities and involve a single or multi-dose regimen (versus current daily dose regimen for the lifetime of a patient) would be superior to current HIV treatment. A reduction or complete elimination of CCR5 expression in myeloid and lymphoid cells would prevent HIV infection and progression, and even cure this disease.

### SUMMARY OF THE INVENTION

[0011] Methods and compositions discussed herein, allow for the prevention and treatment of HIV infection and AIDS, by introducing one or more mutations in the gene for C-C chemokine receptor type 5 (CCR5). The CCR5 gene is also known as CKR5, CCR-5, CD195, CKR-5, CCCKR5, CMKBR5, IDDM22, and CC-CKR-5.

[0012] Methods and compositions discussed herein, provide for prevention or reduction of HIV infection and/or prevention or reduction of the ability for HIV to enter host cells, e.g., in subjects who are already infected. Exemplary host cells for HIV include, but are not limited to, CD4 cells, T cells, gut associated lymphatic tissue (GALT), macrophages, dendritic cells, myeloid precursor cell, and microglia. Viral entry into the host cells requires interaction of the viral glycoproteins gp41 and gp120 with both the CD4 receptor and a co-receptor, e.g., CCR5. If a co-receptor, e.g., CCR5, is not present on the surface of the host cells, the virus cannot bind and enter the host cells. The progress of the disease is thus impeded. By knocking out or knocking down CCR5 in the host cells, e.g., by introducing a protective mutation (such as a CCR5 delta 32 mutation), entry of the HIV virus into the host cells is prevented.

[0013] Methods and compositions discussed herein, provide for treating or delaying the onset or progression of HIV infection or AIDS by gene editing, e.g., using CRISPR-Cas9 mediated methods to alter a CCR5 gene. Altering the CCR5 gene herein refers to reducing or eliminating (1) CCR5 gene expression, (2) CCR5 protein function, or (3) the level of CCR5 protein.

[0014] In one aspect, the methods and compositions discussed herein, inhibit or block a critical aspect of the HIV life cycle, i.e., CCR5-mediated entry into T cells, by alteration (e.g., inactivation) of the CCR5 gene. Exemplary mechanisms that can be associated with the alteration of the CCR5 gene include, but are not limited to, non-homologous end joining (NHEJ) (e.g., classical or alternative), microhomology-mediated end joining (MMEJ), homology-directed repair (e.g., endogenous donor template mediated), SDSA (synthesis dependent strand annealing), single strand annealing or single strand invasion. Alteration of the CCR5 gene, e.g., mediated by NHEJ, can result in a mutation, which typically comprises a deletion or insertion (indel). The introduced mutation can take place in any region of the CCR5 gene, e.g., a promoter region or other non-coding region, or a coding region, so long as the mutation results in reduced or loss of the ability to mediate HIV entry into the cell.

[0015] In another aspect, the methods and compositions discussed herein may be used to alter the CCR5 gene to treat or prevent HIV infection or AIDS by targeting the coding sequence of the CCR5 gene.

[0016] In an embodiment, the gene, e.g., the coding sequence of the CCR5 gene, is targeted to knock out the gene, e.g., to eliminate expression of the gene, e.g., to knock out both alleles of the CCR5 gene, e.g., by introduction of an alteration comprising a mutation (e.g., an insertion or deletion) in the CCR5 gene. This type of alteration is sometimes referred to as “knocking out” the CCR5 gene. While not wishing to be bound by theory, in an embodiment, a targeted knockout approach is mediated by NHEJ using a CRISPR/Cas system comprising a Cas9 molecule, e.g., an enzymatically active Cas9 (eaCas9) molecule, as described herein.

[0017] In another aspect, the methods and compositions discussed herein may be used to alter the CCR5 gene to treat or prevent HIV infection or AIDS by targeting a non-coding sequence of the CCR5 gene, e.g., a promoter, an enhancer, an intron, a 3′UTR, and/or a polyadenylation signal.

[0018] In one embodiment, the gene, e.g., the non-coding sequence of the CCR5 gene, is targeted to knock out the gene, e.g., to eliminate expression of the gene, e.g., to knock out both alleles of the CCR5 gene, e.g., by introduction of an alteration comprising a mutation (e.g., an insertion or deletion) in the CCR5 gene. In an embodiment, the method provides an alteration that comprises an insertion or deletion. This type of alteration is also sometimes referred to as “knocking out” the CCR5 gene. While not wishing to be bound by theory, in an embodiment, a targeted knockout approach is mediated by NHEJ using a CRISPR/Cas system comprising a Cas9 molecule, e.g., an enzymatically active Cas9 (eaCas9) molecule, as described herein.

[0019] In an embodiment, methods and compositions discussed herein, provide for altering (e.g., knocking out) the CCR5 gene. In an embodiment, knocking out the CCR5 gene herein refers to (1) insertion or deletion (e.g., NHEJ-mediated insertion or deletion) of one or more nucleotides of the CCR5 gene (e.g., in close proximity to or within an early coding region or in a non-coding region), or (2) deletion (e.g., NHEJ-mediated deletion) of a genomic sequence of the CCR5 gene (e.g., in a coding region or in a non-coding region). Both approaches give rise to alteration of the CCR5 gene as described herein. In an embodiment, a CCR5 target knockout position is altered by genome editing using the CRISPR/Cas9 system. The CCR5 target knockout position may be targeted by cleaving with either one or more nucleases, or one or more nickases, or a combination thereof.

[0020] “CCR5 target knockout position”, as used herein, refers to a position in the CCR5 gene, which if altered, e.g., disrupted by insertion or deletion of one or more nucleotides, e.g., by NHEJ-mediated alteration, results in alteration of the CCR5 gene. In an embodiment, the position is in the CCR5 coding region, e.g., an early coding region. In another embodiment, the position is in a non-coding sequence of the CCR5 gene, e.g., a promoter, an enhancer, an intron, a 3′UTR, and/or a polyadenylation signal.

[0021] In another embodiment, the CCR5 gene is targeted to knock down the gene, e.g., to reduce or eliminate expression of the gene, e.g., to knock down one or both alleles of the CCR5 gene.

[0022] In one embodiment, the coding region of the CCR5 gene, is targeted to alter the expression of the gene. In another embodiment, a non-coding region (e.g., an enhancer region, a promoter region, an intron, a 5′ UTR, a 3′UTR, or a polyadenylation signal) of the CCR5 gene is targeted to alter the expression of the gene. In an embodiment, the promoter region of the CCR5 gene is targeted to knock down the expression of the CCR5 gene. This type of alteration is also sometimes referred to as “knocking down” the CCR5 gene. While not wishing to be bound by theory, in an embodiment, a targeted knockdown approach is mediated by a CRISPR/Cas system comprising a Cas9 molecule, e.g., an enzymatically inactive Cas9 (eiCas9) molecule or an eiCas9 fusion protein (e.g., an eiCas9 fused to a transcription repressor domain or chromatin modifying protein), as described herein. In an embodiment, the CCR5 gene is targeted to alter (e.g., to block, reduce, or decrease) the transcription of the CCR5 gene. In another embodiment, the CCR5 gene is targeted to alter the chromatin structure (e.g., one or more histone and/or DNA modifications) of the CCR5 gene. In an embodiment, a CCR5 target knockdown position is targeted by genome editing using the CRISPR/Cas9 system. In an embodiment, one or more gRNA molecules comprising a targeting domain are configured to target an enzymatically inactive Cas9 (eiCas9) molecule or an eiCas9 fusion protein (e.g., an eiCas9 fused to a transcription repressor domain), sufficiently close to a CCR5 target knockdown position to reduce, decrease or repress expression of the CCR5 gene.

[0023] “CCR5 target knockdown position”, as used herein, refers to a position in the CCR5 gene, which if targeted, e.g., by an eiCas9 molecule or an eiCas9 fusion described herein, results in reduction or elimination of expression of functional CCR5 gene product. In an embodiment, the transcription of the CCR5 gene is reduced or eliminated. In another embodiment, the chromatin structure of the CCR5 gene is altered. In an embodiment, the position is in the CCR5 promoter sequence. In an embodiment, a position in the promoter sequence of the CCR5 gene is targeted by an enzymatically inactive Cas9 (eiCas9) molecule or an eiCas9 fusion protein, as described herein.

[0024] “CCR5 target position”, as used herein, refers to any position that results in inactivation of the CCR5 gene. In an embodiment, a CCR5 target position refers to any of a CCR5 target knockout position or a CCR5 target knockdown position, as described herein.

[0025] In one aspect, disclosed herein is a gRNA molecule, e.g., an isolated or non-naturally occurring gRNA molecule, comprising a targeting domain which is complementary with a target domain from the CCR5 gene.

[0026] In an embodiment, the targeting domain of the gRNA molecule is configured to provide a cleavage event, e.g., a double strand break or a single strand break, sufficiently close to a CCR5 target position in the CCR5 gene to allow alteration, e.g., alteration associated with NHEJ, of a CCR5 target position in the CCR5 gene. In an embodiment, the alteration comprises an insertion or deletion. In an embodiment, the targeting domain is configured such that a cleavage event, e.g., a double strand or single strand break, is positioned within 1, 2, 3, 4, 5, 10, 15, 20, 25, 30, 35, 40, 45, 50, 60, 70, 80, 90, 100, 150, 200, 300, 400, 450, or 500 nucleotides of a CCR5 target position. The break, e.g., a double strand or single strand break, can be positioned upstream or downstream of a CCR5 target position in the CCR5 gene.

[0027] In an embodiment, a second gRNA molecule comprising a second targeting domain is configured to provide a cleavage event, e.g., a double strand break or a single strand break, sufficiently close to the CCR5 target position in the CCR5 gene, to allow alteration, e.g., alteration associated with NHEJ, of the CCR5 target position in the CCR5 gene, either alone or in combination with the break positioned by said first gRNA molecule. In an embodiment, the targeting domains of the first and second gRNA molecules are configured such that a cleavage event, e.g., a double strand or single strand break, is positioned, independently for each of the gRNA molecules, within 1, 2, 3, 4, 5, 10, 15, 20, 25, 30, 35, 40, 45, 50, 60, 70, 80, 90, 100, 150, 200, 300, 400, 450, or 500 nucleotides of the target position. In an embodiment, the breaks, e.g., double strand or single strand breaks, are positioned on both sides of a nucleotide of a CCR5 target position in the CCR5 gene. In an embodiment, the breaks, e.g., double strand or single strand breaks, are positioned on one side, e.g., upstream or downstream, of a nucleotide of a CCR5 target position in the CCR5 gene.

[0028] In an embodiment, a single strand break is accompanied by an additional single strand break, positioned by a second gRNA molecule, as discussed below. For example, the targeting domains are configured such that a cleavage event, e.g., the two single strand breaks, are positioned within 1, 2, 3, 4, 5, 10, 15, 20, 25, 30, 35, 40, 45, 50, 60, 70, 80, 90, 100, 150, 200, 300, 400, 450, or 500 nucleotides of a CCR5 target position. In an embodiment, the first and second gRNA molecules are configured such, that when guiding a Cas9 molecule, e.g., a Cas9 nickase, a single strand break will be accompanied by an additional single strand break, positioned by a second gRNA, sufficiently close to one another to result in alteration of a CCR5 target position in the CCR5 gene. In an embodiment, the first and second gRNA molecules are configured such that a single strand break positioned by said second gRNA is within 10, 20, 30, 40, or 50 nucleotides of the break positioned by said first gRNA molecule, e.g., when the Cas9 molecule is a nickase. In an embodiment, the two gRNA molecules are configured to position cuts at the same position, or within a few nucleotides of one another, on different strands, e.g., essentially mimicking a double strand break.

[0029] In an embodiment, a double strand break can be accompanied by an additional double strand break, positioned by a second gRNA molecule, as is discussed below. For example, the targeting domain of a first gRNA molecule is configured such that a double strand break is positioned upstream of a CCR5 target position in the CCR5 gene, e.g., within 1, 2, 3, 4, 5, 10, 15, 20, 25, 30, 35, 40, 45, 50, 60, 70, 80, 90, 100, 150, 200, 300, 400, 450, or 500 nucleotides of the target position; and the targeting domain of a second gRNA molecule is configured such that a double strand break is positioned downstream of a CCR5 target position in the CCR5 gene, e.g., within 1, 2, 3, 4, 5, 10, 15, 20, 25, 30, 35, 40, 45, 50, 60, 70, 80, 90, 100, 150, 200, 300, 400, 450, or 500 nucleotides of the target position.

[0030] In an embodiment, a double strand break can be accompanied by two additional single strand breaks, positioned by a second gRNA molecule and a third gRNA molecule. For example, the targeting domain of a first gRNA molecule is configured such that a double strand break is positioned upstream of a CCR5 target position in the CCR5 gene, e.g., within 1, 2, 3, 4, 5, 10, 15, 20, 25, 30, 35, 40, 45, 50, 60, 70, 80, 90, 100, 150, 200, 300, 400, 450, or 500 nucleotides of the target position; and the targeting domains of a second and third gRNA molecule are configured such that two single strand breaks are positioned downstream of a CCR5 target position in the CCR5 gene, e.g., within 1, 2, 3, 4, 5, 10, 15, 20, 25, 30, 35, 40, 45, 50, 60, 70, 80, 90, 100, 150, 200, 300, 400, 450, or 500 nucleotides of the target position. In an embodiment, the targeting domain of the first, second and third gRNA molecules are configured such that a cleavage event, e.g., a double strand or single strand break, is positioned, independently for each of the gRNA molecules.

[0031] In an embodiment, a first and second single strand breaks can be accompanied by two additional single strand breaks positioned by a third gRNA molecule and a fourth gRNA molecule. For example, the targeting domain of a first and second gRNA molecule are configured such that two single strand breaks are positioned upstream of a CCR5 target position in the CCR5 gene, e.g., within 1, 2, 3, 4, 5, 10, 15, 20, 25, 30, 35, 40, 45, 50, 60, 70, 80, 90, 100, 150, 200, 300, 400, 450, or 500 nucleotides of the target position; and the targeting domains of a third and fourth gRNA molecule are configured such that two single strand breaks are positioned downstream of a CCR5 target position in the CCR5 gene, e.g., within 1, 2, 3, 4, 5, 10, 15, 20, 25, 30, 35, 40, 45, 50, 60, 70, 80, 90, 100, 150, 200, 300, 400, 450, or 500 nucleotides of the target position.

[0032] It is contemplated herein that, in an embodiment, when multiple gRNAs are used to generate (1) two single stranded breaks in close proximity, (2) two double stranded breaks, e.g., flanking a CCR5 target position (e.g., to remove a piece of DNA, e.g., a insertion or deletion mutation) or to create more than one indel in an early coding region, (3) one double stranded break and two paired nicks flanking a CCR5 target position (e.g., to remove a piece of DNA, e.g., a insertion or deletion mutation) or (4) four single stranded breaks, two on each side of a CCR5 target position, that they are targeting the same CCR5 target position. It is further contemplated herein that in an embodiment multiple gRNAs may be used to target more than one target position in the same gene.

[0033] In an embodiment, the targeting domain of the first gRNA molecule and the targeting domain of the second gRNA molecules are complementary to opposite strands of the target nucleic acid molecule. In an embodiment, the gRNA molecule and the second gRNA molecule are configured such that the PAMs are oriented outward.

[0034] In an embodiment, the targeting domain of a gRNA molecule is configured to avoid unwanted target chromosome elements, such as repeat elements, e.g., Alu repeats, in the target domain. The gRNA molecule may be a first, second, third and/or fourth gRNA molecule, as described herein.

[0035] In an embodiment, the targeting domain of a gRNA molecule is configured to position a cleavage event sufficiently far from a preselected nucleotide, e.g., the nucleotide of a coding region, such that the nucleotide is not altered. In an embodiment, the targeting domain of a gRNA molecule is configured to position an intronic cleavage event sufficiently far from an intron/exon border, or naturally occurring splice signal, to avoid alteration of the exonic sequence or unwanted splicing events. The gRNA molecule may be a first, second, third and/or fourth gRNA molecule, as described herein.

[0036] In an embodiment, a CCR5 target position is targeted and the targeting domain of a gRNA molecule comprises a sequence that is the same as, or differs by no more than 1, 2, 3, 4, or 5 nucleotides from, a targeting domain sequence from any one of Tables 1A-1F, 2A-2C, 3A-3E, or 4A-4C. In an embodiment, the targeting domain is independently selected from those in Tables 1A-1F, 2A-2C, 3A-3E, or 4A-4C. In an embodiment, the targeting domain is independently selected from:

(SEQ ID NO: 387)

CCUGCCUCCGCUCUACUCAC;

(SEQ ID NO: 388)

GCUGCCGCCCAGUGGGACUU;

(SEQ ID NO: 389)

ACAAUGUGUCAACUCUUGAC;

(SEQ ID NO: 390)

GGUGACAAGUGUGAUCACUU;

(SEQ ID NO: 391)

CCAGGUACCUAUCGAUUGUC;

(SEQ ID NO: 392)

CUUCACAUUGAUUUUUUGGC;

(SEQ ID NO: 393)

GCAGCAUAGUGAGCCCAGAA;

(SEQ ID NO: 394)

GGUACCUAUCGAUUGUCAGG;

(SEQ ID NO: 395)

GUGAGUAGAGCGGAGGCAGG;

(SEQ ID NO: 396)

GCCUCCGCUCUACUCAC;

(SEQ ID NO: 397)

GCCGCCCAGUGGGACUU;

(SEQ ID NO: 398)

AUGUGUCAACUCUUGAC;

(SEQ ID NO: 399)

GACAAUCGAUAGGUACC;

(SEQ ID NO: 400)

CACAUUGAUUUUUUGGC;

(SEQ ID NO: 401)

GCAUAGUGAGCCCAGAA;
or

(SEQ ID NO: 402)

GGUACCUAUCGAUUGUC.

[0037] In an embodiment, the targeting domain is independently selected from those in Table 2A. In an embodiment, the targeting domain is independently selected from those in Table 3A. In an embodiment, the targeting domain is independently selected from those in Table 4A.

[0038] In an embodiment, more than one gRNA is used to position breaks, e.g., two single stranded breaks or two double stranded breaks, or a combination of single strand and double strand breaks, e.g., to create one or more indels, in the target nucleic acid sequence. In an embodiment, the targeting domain of each guide RNA is independently selected from any one of Tables 1A-1F, 2A-2C, 3A-3E, or 4A-4C.

[0039] In an embodiment, the targeting domain of the gRNA molecule is configured to target an enzymatically inactive Cas9 (eiCas9) molecule or an eiCas9 fusion protein (e.g., an eiCas9 fused to a transcription repressor domain), sufficiently close to a CCR5 transcription start site (TSS) to reduce (e.g., block) transcription, e.g., transcription initiation or elongation, binding of one or more transcription enhancers or activators, and/or RNA polymerase. In an embodiment, the targeting domain is configured to target between 1000 bp upstream and 1000 bp downstream (e.g., between 500 bp upstream and 1000 bp downstream, between 1000 bp upstream and 500 bp downstream, between 500 bp upstream and 500 bp downstream, within 500 bp or 200 bp upstream, or within 500 bp or 200 bp downstream) of the TSS of the CCR5 gene. One or more gRNAs may be used to target an eiCas9 to the promoter region of the CCR5 gene.

[0040] In an embodiment, the targeting domain comprises a sequence that is the same as, or differs by no more than 1, 2, 3, 4, or 5 nucleotides from, a targeting domain sequence from any one of Tables 5A-5C, 6A-6E, or 7A-7C. In an embodiment, the targeting domain is independently selected from those in Tables 5A-5C, 6A-6E, or 7A-7C.

[0041] In an embodiment, the targeting domain is independently selected from those in Table 5A. In an embodiment, the targeting domain is independently selected from those in Table 6A. In an embodiment, the targeting domain is independently selected from those in Table 7A.

[0042] In an embodiment, when the CCR5 promoter region is targeted, e.g., for knockdown, the targeting domain can comprise a sequence that is the same as, or differs by no more than 1, 2, 3, 4, or 5 nucleotides from, a targeting domain sequence from any one of Tables 5A-5C, 6A-6E, or 7A-7C. In an embodiment, the targeting domain is independently selected from those in Tables 5A-5C, 6A-6E, or 7A-7C.

[0043] In an embodiment, when the CCR5 target knockdown position is the CCR5 promoter region and more than one gRNA is used to position an eiCas9 molecule or an eiCas9-fusion protein (e.g., an eiCas9-transcription repressor domain fusion protein), in the target nucleic acid sequence, the targeting domain for each guide RNA is independently selected from one of Tables 5A-5C, 6A-6E, or 7A-7C.

[0044] In an embodiment, the targeting domain comprises a sequence that is the same as, or differs by no more than 1, 2, 3, 4, or 5 nucleotides from, a targeting domain sequence from Table 18. In an embodiment, the targeting domain is independently selected from those in Table 18.

[0045] In an embodiment, the targeting domain which is complementary with a target domain from the CCR5 target position in the CCR5 gene is 16 nucleotides or more in length. In an embodiment, the targeting domain is 16 nucleotides in length. In an embodiment, the targeting domain is 17 nucleotides in length. In other embodiments, the targeting domain is 18 nucleotides in length. In still other embodiments, the targeting domain is 19 nucleotides in length. In still other embodiments, the targeting domain is 20 nucleotides in length. In an embodiment, the targeting domain is 21 nucleotides in length. In an embodiment, the targeting domain is 22 nucleotides in length. In an embodiment, the targeting domain is 23 nucleotides in length. In an embodiment, the targeting domain is 24 nucleotides in length. In an embodiment, the targeting domain is 25 nucleotides in length. In an embodiment, the targeting domain is 26 nucleotides in length.

[0046] In an embodiment, the targeting domain comprises 16 nucleotides.

[0047] In an embodiment, the targeting domain comprises 17 nucleotides.

[0048] In an embodiment, the targeting domain comprises 18 nucleotides.

[0049] In an embodiment, the targeting domain comprises 19 nucleotides.

[0050] In an embodiment, the targeting domain comprises 20 nucleotides.

[0051] In an embodiment, the targeting domain comprises 21 nucleotides.

[0052] In an embodiment, the targeting domain comprises 22 nucleotides.

[0053] In an embodiment, the targeting domain comprises 23 nucleotides.

[0054] In an embodiment, the targeting domain comprises 24 nucleotides.

[0055] In an embodiment, the targeting domain comprises 25 nucleotides.

[0056] In an embodiment, the targeting domain comprises 26 nucleotides.

[0057] A gRNA as described herein may comprise from 5′ to 3′: a targeting domain (comprising a “core domain”, and optionally a “secondary domain”); a first complementarity domain; a linking domain; a second complementarity domain; a proximal domain; and a tail domain. In some embodiments, the proximal domain and tail domain are taken together as a single domain.

[0058] In an embodiment, a gRNA comprises a linking domain of no more than 25 nucleotides in length; a proximal and tail domain, that taken together, are at least 20 nucleotides in length; and a targeting domain equal to or greater than 16, 17, 18, 19, 20, 21, 22, 23, 24, 25 or 26 nucleotides in length.

[0059] In another embodiment, a gRNA comprises a linking domain of no more than 25 nucleotides in length; a proximal and tail domain, that taken together, are at least 25 nucleotides in length; and a targeting domain equal to or greater than 16, 17, 18, 19, 20, 21, 22, 23, 24, 25 or 26 nucleotides in length.

[0060] In another embodiment, a gRNA comprises a linking domain of no more than 25 nucleotides in length; a proximal and tail domain, that taken together, are at least 30 nucleotides in length; and a targeting domain equal to or greater than 16, 17, 18, 19, 20, 21, 22, 23, 24, 25 or 26 nucleotides in length.

[0061] In another embodiment, a gRNA comprises a linking domain of no more than 25 nucleotides in length; a proximal and tail domain, that taken together, are at least 40 nucleotides in length; and a targeting domain equal to or greater than 16, 17, 18, 19, 20, 21, 22, 23, 24, 25 or 26 nucleotides in length.

[0062] A cleavage event, e.g., a double strand or single strand break, is generated by a Cas9 molecule. The Cas9 molecule may be an enzymatically active Cas9 (eaCas9) molecule, e.g., an eaCas9 molecule that forms a double strand break in a target nucleic acid or an eaCas9 molecule forms a single strand break in a target nucleic acid (e.g., a nickase molecule).

[0063] In an embodiment, the eaCas9 molecule catalyzes a double strand break.

[0064] In some embodiments, the eaCas9 molecule comprises HNH-like domain cleavage activity but has no, or no significant, N-terminal RuvC-like domain cleavage activity. In this case, the eaCas9 molecule is an HNH-like domain nickase, e.g., the eaCas9 molecule comprises a mutation at D10, e.g., D10A. In other embodiments, the eaCas9 molecule comprises N-terminal RuvC-like domain cleavage activity but has no, or no significant, HNH-like domain cleavage activity. In an embodiment, the eaCas9 molecule is an N-terminal RuvC-like domain nickase, e.g., the eaCas9 molecule comprises a mutation at H840, e.g., H840A. In an embodiment, the eaCas9 molecule is an N-terminal RuvC-like domain nickase, e.g., the eaCas9 molecule comprises a mutation at N863, e.g., N863A.

[0065] In an embodiment, a single strand break is formed in the strand of the target nucleic acid to which the targeting domain of said gRNA is complementary. In another embodiment, a single strand break is formed in the strand of the target nucleic acid other than the strand to which the targeting domain of said gRNA is complementary.

[0066] In another aspect, disclosed herein is a nucleic acid, e.g., an isolated or non-naturally occurring nucleic acid, e.g., DNA, that comprises (a) a sequence that encodes a gRNA molecule comprising a targeting domain that is complementary with a CCR5 target position in the CCR5 gene as disclosed herein.

[0067] In an embodiment, the nucleic acid encodes a gRNA molecule, e.g., a first gRNA molecule, comprising a targeting domain configured to provide a cleavage event, e.g., a double strand break or a single strand break, sufficiently close to a CCR5 target position in the CCR5 gene to allow alteration, e.g., alteration associated with NHEJ, of a CCR5 target position in the CCR5 gene.

[0068] In an embodiment, the nucleic acid encodes a gRNA molecule, e.g., a first gRNA molecule, comprising a targeting domain configured to target an enzymatically inactive Cas9 (eiCas9) molecule or an eiCas9 fusion protein (e.g., an eiCas9 fused to a transcription repressor domain or chromatin modifying protein), sufficiently close to a CCR5 knockdown target position to reduce, decrease or repress expression of the CCR5 gene.

[0069] In an embodiment, the nucleic acid encodes a gRNA molecule, e.g., the first gRNA molecule, comprising a targeting domain comprising a sequence that is the same as, or differs by no more than 1, 2, 3, 4, or 5 nucleotides from, a targeting domain sequence from any one of Tables 1A-1F, 2A-2C, 3A-3E, 4A-4C, 5A-5C, 6A-6E, 7A-7C, or 18. In an embodiment, the nucleic acid encodes a gRNA molecule comprising a targeting domain is selected from those in Tables 1A-1F, 2A-2C, 3A-3E, 4A-4C, 5A-5C, 6A-6E, 7A-7C, or 18.

[0070] In an embodiment, the nucleic acid encodes a gRNA molecule, e.g., the first gRNA molecule, comprising a targeting domain comprising a sequence that is the same as, or differs by no more than 1, 2, 3, 4, or 5 nucleotides from, a targeting domain sequence from any one of Tables 1A-1F, 2A-2C, 3A-3E, or 4A-4C. In an embodiment, the nucleic acid encodes a gRNA molecule comprising a targeting domain is selected from those in Tables 1A-1F, 2A-2C, 3A-3E, or 4A-4C.

[0071] In an embodiment, the nucleic acid encodes a gRNA molecule, e.g., the first gRNA molecule, comprising a targeting domain comprising a sequence that is the same as, or differs by no more than 1, 2, 3, 4, or 5 nucleotides from, a targeting domain sequence from any one of Tables 5A-5C, 6A-6E, or 7A-7C. In an embodiment, the nucleic acid encodes a gRNA molecule comprising a targeting domain is selected from those in Tables 5A-5C, 6A-6E, or 7A-7C.

[0072] In an embodiment, the nucleic acid encodes a modular gRNA, e.g., one or more nucleic acids encode a modular gRNA. In other embodiments, the nucleic acid encodes a chimeric gRNA. The nucleic acid may encode a gRNA, e.g., the first gRNA molecule, comprising a targeting domain comprising 16 nucleotides or more in length. In an embodiment, the nucleic acid encodes a gRNA, e.g., the first gRNA molecule, comprising a targeting domain that is 16 nucleotides in length. In another embodiment, the nucleic acid encodes a gRNA, e.g., the first gRNA molecule, comprising a targeting domain that is 17 nucleotides in length. In yet another embodiment, the nucleic acid encodes a gRNA, e.g., the first gRNA molecule, comprising a targeting domain that is 18 nucleotides in length. In still another embodiment, the nucleic acid encodes a gRNA, e.g., the first gRNA molecule, comprising a targeting domain that is 19 nucleotides in length. In still another embodiment, the nucleic acid encodes a gRNA, e.g., the first gRNA molecule, comprising a targeting domain that is 20 nucleotides in length. In still another embodiment, the nucleic acid encodes a gRNA, e.g., the first gRNA molecule, comprising a targeting domain that is 21 nucleotides in length. In still another embodiment, the nucleic acid encodes a gRNA, e.g., the first gRNA molecule, comprising a targeting domain that is 22 nucleotides in length. In still another embodiment, the nucleic acid encodes a gRNA, e.g., the first gRNA molecule, comprising a targeting domain that is 23 nucleotides in length. In still another embodiment, the nucleic acid encodes a gRNA, e.g., the first gRNA molecule, comprising a targeting domain that is 24 nucleotides in length. In still another embodiment, the nucleic acid encodes a gRNA, e.g., the first gRNA molecule, comprising a targeting domain that is 25 nucleotides in length. In still another embodiment, the nucleic acid encodes a gRNA, e.g., the first gRNA molecule, comprising a targeting domain that is 26 nucleotides in length. In an embodiment, a nucleic acid encodes a gRNA comprising from 5′ to 3′: a targeting domain (comprising a “core domain”, and optionally a “secondary domain”); a first complementarity domain; a linking domain; a second complementarity domain; a proximal domain; and a tail domain. In an embodiment, the proximal domain and tail domain are taken together as a single domain.

[0073] In an embodiment, a nucleic acid encodes a gRNA e.g., the first gRNA molecule, comprising a linking domain of no more than 25 nucleotides in length; a proximal and tail domain, that taken together, are at least 20 nucleotides in length; and a targeting domain equal to or greater than 16, 17, 18, 19, 20, 21, 22, 23, 24, 25 or 26 nucleotides in length.

[0074] In an embodiment, a nucleic acid encodes a gRNA e.g., the first gRNA molecule, comprising a linking domain of no more than 25 nucleotides in length; a proximal and tail domain, that taken together, are at least 25 nucleotides in length; and a targeting equal to or greater than 16, 17, 18, 19, 20, 21, 22, 23, 24, 25 or 26 nucleotides in length.

[0075] In an embodiment, a nucleic acid encodes a gRNA e.g., the first gRNA molecule, comprising a linking domain of no more than 25 nucleotides in length; a proximal and tail domain, that taken together, are at least 30 nucleotides in length; and a targeting domain equal to or greater than 16, 17, 18, 19, 20, 21, 22, 23, 24, 25 or 26 nucleotides in length.

[0076] In an embodiment, a nucleic acid encodes a gRNA comprising e.g., the first gRNA molecule, a linking domain of no more than 25 nucleotides in length; a proximal and tail domain, that taken together, are at least 40 nucleotides in length; and a targeting domain equal to or greater than 16, 17, 18, 19, 20, 21, 22, 23, 24, 25 or 26 nucleotides in length.

[0077] In an embodiment, a nucleic acid comprises (a) a sequence that encodes a gRNA molecule e.g., the first gRNA molecule, comprising a targeting domain that is complementary with a target domain in the CCR5 gene as disclosed herein, and further comprising (b) a sequence that encodes a Cas9 molecule.

[0078] The Cas9 molecule may be a nickase molecule, an enzymatically active Cas9 (eaCas9) molecule, e.g., an eaCas9 molecule that forms a double strand break in a target nucleic acid and/or an eaCas9 molecule that forms a single strand break in a target nucleic acid. In an embodiment, a single strand break is formed in the strand of the target nucleic acid to which the targeting domain of said gRNA is complementary. In another embodiment, a single strand break is formed in the strand of the target nucleic acid other than the strand to which to which the targeting domain of said gRNA is complementary.

[0079] In an embodiment, the eaCas9 molecule catalyzes a double strand break.

[0080] In an embodiment, the eaCas9 molecule comprises HNH-like domain cleavage activity but has no, or no significant, N-terminal RuvC-like domain cleavage activity. In another embodiment, the said eaCas9 molecule is an HNH-like domain nickase, e.g., the eaCas9 molecule comprises a mutation at D10, e.g., D10A. In another embodiment, the eaCas9 molecule comprises N-terminal RuvC-like domain cleavage activity but has no, or no significant, HNH-like domain cleavage activity. In another embodiment, the eaCas9 molecule is an N-terminal RuvC-like domain nickase, e.g., the eaCas9 molecule comprises a mutation at H840, e.g., H840A. In another embodiment, the eaCas9 molecule is an N-terminal RuvC-like domain nickase, e.g., the eaCas9 molecule comprises a mutation at N863, e.g., N863A.

[0081] A nucleic acid disclosed herein may comprise (a) a sequence that encodes a gRNA molecule comprising a targeting domain that is complementary with a target domain in the CCR5 gene as disclosed herein; (b) a sequence that encodes a Cas9 molecule, e.g., a Cas9 molecule described herein.

[0082] In an embodiment, the Cas9 molecule is an enzymatically active Cas9 (eaCas9) molecule. In an embodiment, the Cas9 molecule is an enzymatically inactive Cas9 (eiCas9) molecule or a modified eiCas9 molecule, e.g., the eiCas9 molecule is fused to Krüppel-associated box (KRAB) to generate an eiCas9-KRAB fusion protein molecule.

[0083] A nucleic acid disclosed herein may comprise (a) a sequence that encodes a gRNA molecule comprising a targeting domain that is complementary with a target domain in the CCR5 gene as disclosed herein; (b) a sequence that encodes a Cas9 molecule; and further may comprise (c)(i) a sequence that encodes a second gRNA molecule described herein having a targeting domain that is complementary to a second target domain of the CCR5 gene, and optionally, (c)(ii) a sequence that encodes a third gRNA molecule described herein having a targeting domain that is complementary to a third target domain of the CCR5 gene; and optionally, (c)(iii) a sequence that encodes a fourth gRNA molecule described herein having a targeting domain that is complementary to a fourth target domain of the CCR5 gene.

[0084] In an embodiment, a nucleic acid encodes a second gRNA molecule comprising a targeting domain configured to provide a cleavage event, e.g., a double strand break or a single strand break, sufficiently close to a CCR5 target position in the CCR5 gene, to allow alteration, e.g., alteration associated with NHEJ, of a CCR5 target position in the CCR5 gene, either alone or in combination with the break positioned by said first gRNA molecule.

[0085] In an embodiment, a nucleic acid encodes a second gRNA molecule comprising a targeting domain configured to target an enzymatically inactive Cas9 (eiCas9) molecule or an eiCas9 fusion protein (e.g., an eiCas9 fused to a transcription repressor domain or chromatin modifying protein), sufficiently close to a CCR5 knockdown target position to reduce, decrease or repress expression of the CCR5 gene.

[0086] In an embodiment, a nucleic acid encodes a third gRNA molecule comprising a targeting domain configured to provide a cleavage event, e.g., a double strand break or a single strand break, sufficiently close to a CCR5 target position in the CCR5 gene to allow alteration, e.g., alteration associated with NHEJ, of a CCR5 target position in the CCR5 gene, either alone or in combination with the break positioned by the first and/or second gRNA molecule.

[0087] In an embodiment, a nucleic acid encodes a third gRNA molecule comprising a targeting domain configured to target an enzymatically inactive Cas9 (eiCas9) molecule or an eiCas9 fusion protein (e.g., an eiCas9 fused to a transcription repressor domain or chromatin remodeling protein), sufficiently close to a CCR5 knockdown target position to reduce, decrease or repress expression of the CCR5 gene.

[0088] In an embodiment, a nucleic acid encodes a fourth gRNA molecule comprising a targeting domain configured to provide a cleavage event, e.g., a double strand break or a single strand break, sufficiently close to a CCR5 target position in the CCR5 gene to allow alteration, e.g., alteration associated with NHEJ, of a CCR5 target position in the CCR5 gene, either alone or in combination with the break positioned by the first gRNA molecule, the second gRNA molecule and/or the third gRNA molecule.

[0089] In an embodiment, the nucleic acid encodes a second gRNA molecule. The second gRNA is selected to target the same CCR5 target position as the first gRNA molecule. Optionally, the nucleic acid may encode a third gRNA, and further optionally, the nucleic acid may encode a fourth gRNA molecule. The third gRNA molecule and the fourth gRNA molecule are selected to target the same CCR5 target position as the first and second gRNA molecules.

[0090] In an embodiment, the nucleic acid encodes a second gRNA molecule comprising a targeting domain comprising a sequence that is the same as, or differs by no more than 1, 2, 3, 4, or 5 nucleotides from, a targeting domain sequence from one of Tables 1A-1F, 2A-2C, 3A-3E, 4A-4C, 5A-5C, 6A-6E, 7A-7C, or 18. In an embodiment, the nucleic acid encodes a second gRNA molecule comprising a targeting domain selected from those in Tables 1A-1F, 2A-2C, 3A-3E, 4A-4C, 5A-5C, 6A-6E, 7A-7C, or 18. In an embodiment, when a third or fourth gRNA molecule are present, the third and fourth gRNA molecules may independently comprise a targeting domain comprising a sequence that is the same as, or differs by no more than 1, 2, 3, 4, or 5 nucleotides from, a targeting domain sequence from one of Tables 1A-1F, 2A-2C, 3A-3E, 4A-4C, 5A-5C, 6A-6E, 7A-7C, or 18. In a further embodiment, when a third or fourth gRNA molecule are present, the third and fourth gRNA molecules may independently comprise a targeting domain selected from those in Tables 1A-1F, 2A-2C, 3A-3E, 4A-4C, 5A-5C, 6A-6E, 7A-7C, or 18.

[0091] In an embodiment, the nucleic acid encodes a second gRNA molecule comprising a targeting domain comprising a sequence that is the same as, or differs by no more than 1, 2, 3, 4, or 5 nucleotides from, a targeting domain sequence from one of Tables 1A-1F, 2A-2C, 3A-3E, or 4A-4C. In an embodiment, the nucleic acid encodes a second gRNA molecule comprising a targeting domain selected from those in Tables 1A-1F, 2A-2C, 3A-3E, or 4A-4C. In an embodiment, when a third or fourth gRNA molecule are present, the third and fourth gRNA molecules may independently comprise a targeting domain comprising a sequence that is the same as, or differs by no more than 1, 2, 3, 4, or 5 nucleotides from, a targeting domain sequence from one of Tables 1A-1F, 2A-2C, 3A-3E, or 4A-4C. In a further embodiment, when a third or fourth gRNA molecule are present, the third and fourth gRNA molecules may independently comprise a targeting domain selected from those in Tables 1A-1F, 2A-2C, 3A-3E, or 4A-4C.

[0092] In an embodiment, the nucleic acid encodes a second gRNA molecule comprising a targeting domain comprising a sequence that is the same as, or differs by no more than 1, 2, 3, 4, or 5 nucleotides from, a targeting domain sequence from one of Tables 5A-5C, 6A-6E, or 7A-7C. In an embodiment, the nucleic acid encodes a second gRNA molecule comprising a targeting domain selected from those in Tables 5A-5C, 6A-6E, or 7A-7C. In an embodiment, when a third or fourth gRNA molecule are present, the third and fourth gRNA molecules may independently comprise a targeting domain comprising a sequence that is the same as, or differs by no more than 1, 2, 3, 4, or 5 nucleotides from, a targeting domain sequence from one of Tables 5A-5C, 6A-6E, or 7A-7C. In a further embodiment, when a third or fourth gRNA molecule are present, the third and fourth gRNA molecules may independently comprise a targeting domain selected from those in Tables 5A-5C, 6A-6E, or 7A-7C.

[0093] In an embodiment, the nucleic acid encodes a second gRNA which is a modular gRNA, e.g., wherein one or more nucleic acid molecules encode a modular gRNA. In another embodiment, the nucleic acid encoding a second gRNA is a chimeric gRNA. In yet another embodiment, when a nucleic acid encodes a third or fourth gRNA, the third and fourth gRNA may be a modular gRNA or a chimeric gRNA. When multiple gRNAs are used, any combination of modular or chimeric gRNAs may be used.

[0094] A nucleic acid may encode a second, a third, and/or a fourth gRNA, each independently, comprising a targeting domain comprising 16 nucleotides or more in length. In an embodiment, the nucleic acid encodes a second gRNA comprising a targeting domain that is 16 nucleotides in length. In another embodiment, the nucleic acid encodes a second gRNA comprising a targeting domain that is 17 nucleotides in length. In yet another embodiment, the nucleic acid encodes a second gRNA comprising a targeting domain that is 18 nucleotides in length. In still another embodiment, the nucleic acid encodes a second gRNA comprising a targeting domain that is 19 nucleotides in length. In still other embodiments, the nucleic acid encodes a second gRNA comprising a targeting domain that is 20 nucleotides in length. In still another embodiment, the nucleic acid encodes a second gRNA comprising a targeting domain that is 21 nucleotides in length. In still another embodiment, the nucleic acid encodes a second gRNA comprising a targeting domain that is 22 nucleotides in length. In still another embodiment, the nucleic acid encodes a second gRNA comprising a targeting domain that is 23 nucleotides in length. In still another embodiment, the nucleic acid encodes a second gRNA comprising a targeting domain that is 24 nucleotides in length. In still another embodiment, the nucleic acid encodes a second gRNA comprising a targeting domain that is 25 nucleotides in length. In still another embodiment, the nucleic acid encodes a second gRNA comprising a targeting domain that is 26 nucleotides in length.

[0095] In an embodiment, the targeting domain comprises 16 nucleotides.

[0096] In an embodiment, the targeting domain comprises 17 nucleotides.

[0097] In an embodiment, the targeting domain comprises 18 nucleotides.

[0098] In an embodiment, the targeting domain comprises 19 nucleotides.

[0099] In an embodiment, the targeting domain comprises 20 nucleotides.

[0100] In an embodiment, the targeting domain comprises 21 nucleotides.

[0101] In an embodiment, the targeting domain comprises 22 nucleotides.

[0102] In an embodiment, the targeting domain comprises 23 nucleotides.

[0103] In an embodiment, the targeting domain comprises 24 nucleotides.

[0104] In an embodiment, the targeting domain comprises 25 nucleotides.

[0105] In an embodiment, the targeting domain comprises 26 nucleotides.

[0106] In an embodiment, a nucleic acid encodes a second, a third, and/or a fourth gRNA, each independently, comprising from 5′ to 3′: a targeting domain (comprising a “core domain”, and optionally a “secondary domain”); a first complementarity domain; a linking domain; a second complementarity domain; a proximal domain; and a tail domain. In some embodiments, the proximal domain and tail domain are taken together as a single domain.

[0107] In an embodiment, a nucleic acid encodes a second, a third, and/or a fourth gRNA comprising a linking domain of no more than 25 nucleotides in length; a proximal and tail domain, that taken together, are at least 20 nucleotides in length; and a targeting domain equal to or greater than 16, 17, 18, 19, 20, 21, 22, 23, 24, 25 or 26 nucleotides in length.

[0108] In an embodiment, a nucleic acid encodes a second, a third, and/or a fourth gRNA comprising a linking domain of no more than 25 nucleotides in length; a proximal and tail domain, that taken together, are at least 25 nucleotides in length; and a targeting domain equal to or greater than 16, 17, 18, 19, 20, 21, 22, 23, 24, 25 or 26 nucleotides in length.

[0109] In an embodiment, a nucleic acid encodes a second, a third, and/or a fourth gRNA comprising a linking domain of no more than 25 nucleotides in length; a proximal and tail domain, that taken together, are at least 30 nucleotides in length; and a targeting domain equal to or greater than 16, 17, 18, 19, 20, 21, 22, 23, 24, 25 or 26 nucleotides in length.

[0110] In an embodiment, a nucleic acid encodes a second, a third, and/or a fourth gRNA comprising a linking domain of no more than 25 nucleotides in length; a proximal and tail domain, that taken together, are at least 40 nucleotides in length; and a targeting domain equal to or greater than 16, 17, 18, 19, 20, 21, 22, 23, 24, 25 or 26 nucleotides in length.

[0111] In an embodiment, a nucleic acid encodes (a) a sequence that encodes a gRNA molecule comprising a targeting domain that is complementary with a target domain in the CCR5 gene as disclosed herein, and (b) a sequence that encodes a Cas9 molecule, e.g., a Cas9 molecule described herein. In an embodiment, (a) and (b) are present on the same nucleic acid molecule, e.g., the same vector, e.g., the same viral vector, e.g., the same adeno-associated virus (AAV) vector. In an embodiment, the nucleic acid molecule is an AAV vector. Exemplary AAV vectors that may be used in any of the described compositions and methods include an AAV1 vector, a modified AAV1 vector, an AAV2 vector, a modified AAV2 vector, an AAV3 vector, an AAV4 vector, a modified AAV4 vector, an AAV5 vector, a modified AAV5 vector, a modified AAV3 vector, an AAV6 vector, a modified AAV6 vector, an AAV8 vector an AAV9 vector, an AAV.rh10 vector, a modified AAV.rh10 vector, an AAV.rh32/33 vector, a modified AAV.rh32/33 vector, an AAV.rh43 vector, a modified AAV.rh43 vector, an AAV.rh64R1 vector, and a modified AAV.rh64R1 vector.

[0112] In another embodiment, (a) is present on a first nucleic acid molecule, e.g. a first vector, e.g., a first viral vector, e.g., a first AAV vector; and (b) is present on a second nucleic acid molecule, e.g., a second vector, e.g., a second vector, e.g., a second AAV vector. The first and second nucleic acid molecules may be AAV vectors.

[0113] In another embodiment, a nucleic acid encodes (a) a sequence that encodes a gRNA molecule comprising a targeting domain that is complementary with a target domain in the CCR5 gene as disclosed herein, and (b) a sequence that encodes a Cas9 molecule, e.g., a Cas9 molecule described herein; and further comprises (c)(i) a sequence that encodes a second gRNA molecule as described herein and optionally, (c)(ii) a sequence that encodes a third gRNA molecule described herein having a targeting domain that is complementary to a third target domain of the CCR5 gene; and optionally, (c)(iii) a sequence that encodes a fourth gRNA molecule described herein having a targeting domain that is complementary to a fourth target domain of the CCR5 gene. In an embodiment, the nucleic acid comprises (a), (b) and (c)(i). In an embodiment, the nucleic acid comprises (a), (b), (c)(i) and (c)(ii). In an embodiment, the nucleic acid comprises (a), (b), (c)(i), (c)(ii) and (c)(iii). Each of (a) and (c)(i) may be present on the same nucleic acid molecule, e.g., the same vector, e.g., the same viral vector, e.g., the same adeno-associated virus (AAV) vector. In an embodiment, the nucleic acid molecule is an AAV vector.

[0114] In an embodiment, (a) and (c)(i) are on different vectors. For example, (a) may be present on a first nucleic acid molecule, e.g. a first vector, e.g., a first viral vector, e.g., a first AAV vector; and (c)(i) may be present on a second nucleic acid molecule, e.g., a second vector, e.g., a second vector, e.g., a second AAV vector. In an embodiment, the first and second nucleic acid molecules are AAV vectors.

[0115] In another embodiment, each of (a), (b), and (c)(i) are present on the same nucleic acid molecule, e.g., the same vector, e.g., the same viral vector, e.g., an AAV vector. In an embodiment, the nucleic acid molecule is an AAV vector. In an alternate embodiment, one of (a), (b), and (c)(i) is encoded on a first nucleic acid molecule, e.g., a first vector, e.g., a first viral vector, e.g., a first AAV vector; and a second and third of (a), (b), and (c)(i) is encoded on a second nucleic acid molecule, e.g., a second vector, e.g., a second vector, e.g., a second AAV vector. The first and second nucleic acid molecule may be AAV vectors.

[0116] In an embodiment, (a) is present on a first nucleic acid molecule, e.g., a first vector, e.g., a first viral vector, a first AAV vector; and (b) and (c)(i) are present on a second nucleic acid molecule, e.g., a second vector, e.g., a second vector, e.g., a second AAV vector. The first and second nucleic acid molecule may be AAV vectors.

[0117] In another embodiment, (b) is present on a first nucleic acid molecule, e.g., a first vector, e.g., a first viral vector, e.g., a first AAV vector; and (a) and (c)(i) are present on a second nucleic acid molecule, e.g., a second vector, e.g., a second vector, e.g., a second AAV vector. The first and second nucleic acid molecule may be AAV vectors.

[0118] In another embodiment, (c)(i) is present on a first nucleic acid molecule, e.g., a first vector, e.g., a first viral vector, e.g., a first AAV vector; and (b) and (a) are present on a second nucleic acid molecule, e.g., a second vector, e.g., a second vector, e.g., a second AAV vector. The first and second nucleic acid molecule may be AAV vectors.

[0119] In another embodiment, each of (a), (b) and (c)(i) are present on different nucleic acid molecules, e.g., different vectors, e.g., different viral vectors, e.g., different AAV vector. For example, (a) may be on a first nucleic acid molecule, (b) on a second nucleic acid molecule, and (c)(i) on a third nucleic acid molecule. The first, second and third nucleic acid molecule may be AAV vectors.

[0120] In another embodiment, when a third and/or fourth gRNA molecule are present, each of (a), (b), (c)(i), (c)(ii) and (c)(iii) may be present on the same nucleic acid molecule, e.g., the same vector, e.g., the same viral vector, e.g., an AAV vector. In an embodiment, the nucleic acid molecule is an AAV vector. In an alternate embodiment, each of (a), (b), (c)(i), (c)(ii) and (c)(iii) may be present on the different nucleic acid molecules, e.g., different vectors, e.g., the different viral vectors, e.g., different AAV vectors. In a further embodiment, each of (a), (b), (c)(i), (c)(ii) and (c)(iii) may be present on more than one nucleic acid molecule, but fewer than five nucleic acid molecules, e.g., AAV vectors.

[0121] The nucleic acids described herein may comprise a promoter operably linked to the sequence that encodes the gRNA molecule of (a), e.g., a promoter described herein. The nucleic acid may further comprise a second promoter operably linked to the sequence that encodes the second, third and/or fourth gRNA molecule of (c), e.g., a promoter described herein. The promoter and second promoter differ from one another. In some embodiments, the promoter and second promoter are the same.

[0122] The nucleic acids described herein may further comprise a promoter operably linked to the sequence that encodes the Cas9 molecule of (b), e.g., a promoter described herein.

[0123] In another aspect, disclosed herein is a composition comprising (a) a gRNA molecule comprising a targeting domain that is complementary with a target domain in the CCR5 gene, as described herein. The composition of (a) may further comprise (b) a Cas9 molecule, e.g., a Cas9 molecule as described herein. A composition of (a) and (b) may further comprise (c) a second, third and/or fourth gRNA molecule, e.g., a second, third and/or fourth gRNA molecule described herein. In an embodiment, the composition is a pharmaceutical composition. The compositions described herein, e.g., pharmaceutical compositions described herein, can be used in the treatment or prevention of HIV or AIDS in a subject, e.g., in accordance with a method disclosed herein.

[0124] In another aspect, disclosed herein is a method of altering a cell, e.g., altering the structure, e.g., altering the sequence, of a target nucleic acid of a cell, comprising contacting said cell with: (a) a gRNA that targets the CCR5 gene, e.g., a gRNA as described herein; (b) a Cas9 molecule, e.g., a Cas9 molecule as described herein; and optionally, (c) a second, third and/or fourth gRNA that targets CCR5 gene, e.g., a second, third and/or fourth gRNA as described herein.

[0125] In an embodiment, the method comprises contacting said cell with (a) and (b).

[0126] In an embodiment, the method comprises contacting said cell with (a), (b), and (c).

[0127] The gRNA of (a) and optionally (c) may be selected from any of Tables 1A-1F, 2A-2C, 3A-3E, 4A-4C, 5A-5C, 6A-6E, 7A-7C, or 18, or a gRNA that differs by no more than 1, 2, 3, 4, or 5 nucleotides from, a targeting domain sequence from any of Tables 1A-1F, 2A-2C, 3A-3E, 4A-4C, 5A-5C, 6A-6E, 7A-7C, or 18.

[0128] In an embodiment, the method comprises contacting a cell from a subject suffering from or likely to develop an HIV infection or AIDS. The cell may be from a subject who does not have a mutation at a CCR5 target position.

[0129] In an embodiment, the cell being contacted in the disclosed method is a target cell from a circulating blood cell, a progenitor cell, or a stem cell, e.g., a hematopoietic stem cell (HSC) or a hematopoietic stem/progenitor cell (HSPC). In an embodiment, the target cell is a T cell (e.g., a CD4+ T cell, a CD8+ T cell, a helper T cell, a regulatory T cell, a cytotoxic T cell, a memory T cell, a T cell precursor or a natural killer T cell), a B cell (e.g., a progenitor B cell, a Pre B cell, a Pro B cell, a memory B cell, a plasma B cell), a monocyte, a megakaryocyte, a neutrophil, an eosinophil, a basophil, a mast cell, a reticulocyte, a lymphoid progenitor cell, a myeloid progenitor cell, or a hematopoietic stem cell. In an embodiment, the target cell is a bone marrow cell, (e.g., a lymphoid progenitor cell, a myeloid progenitor cell, an erythroid progenitor cell, a hematopoietic stem cell, or a mesenchymal stem cell). In an embodiment, the cell is a CD4 cell, a T cell, a gut associated lymphatic tissue (GALT), a macrophage, a dendritic cell, a myeloid precursor cell, or a microglia. The contacting may be performed ex vivo and the contacted cell may be returned to the subject's body after the contacting step. In another embodiment, the contacting step may be performed in vivo.

[0130] In an embodiment, the method of altering a cell as described herein comprises acquiring knowledge of the presence of a CCR5 target position in said cell, prior to the contacting step. Acquiring knowledge of the presence of a CCR5 target position in the cell may be by sequencing the CCR5 gene, or a portion of the CCR5 gene.

[0131] In an embodiment, the contacting step of the method comprises contacting the cell with a nucleic acid, e.g., a vector, e.g., an AAV vector, that expresses at least one of (a), (b), and (c). In an embodiment, the contacting step of the method comprises contacting the cell with a nucleic acid, e.g., a vector, e.g., an AAV vector, that encodes each of (a), (b), and (c). In another embodiment, the contacting step of the method comprises delivering to the cell a Cas9 molecule of (b) and a nucleic acid which encodes a gRNA of (a) and optionally, a second gRNA of (c)(i) (and further optionally, a third gRNA of (c)(ii) and/or fourth gRNA of (c)(iii).

[0132] In an embodiment, the contacting step comprises contacting the cell with a nucleic acid, e.g., a vector, e.g., an AAV vector, e.g., an AAV1 vector, a modified AAV1 vector, an AAV2 vector, a modified AAV2 vector, an AAV3 vector, a modified AAV3 vector, an AAV4 vector, a modified AAV4 vector, an AAV5 vector, a modified AAV5 vector, an AAV6 vector, a modified AAV6 vector, an AAV7 vector, a modified AAV7 vector, an AAV8 vector, an AAV9 vector, an AAV.rh10 vector, a modified AAV.rh10 vector, an AAV.rh32/33 vector, a modified AAV.rh32/33 vector, an AAV.rh43 vector, a modified AAV.rh43 vector, an AAV.rh64R1 vector, and a modified AAV.rh64R1 vector. a described herein.

[0133] In an embodiment, the contacting step comprises delivering to the cell a Cas9 molecule of (b), as a protein or an mRNA, and a nucleic acid which encodes a gRNA of (a) and optionally a second, third and/or fourth gRNA of (c).

[0134] In an embodiment, the contacting step comprises delivering to the cell a Cas9 molecule of (b), as a protein or an mRNA, said gRNA of (a), as an RNA, and optionally said second, third and/or fourth gRNA of (c), as an RNA.

[0135] In an embodiment, the contacting step comprises delivering to the cell a gRNA of (a) as an RNA, optionally the second, third and/or fourth gRNA of (c) as an RNA, and a nucleic acid that encodes the Cas9 molecule of (b).

[0136] In an embodiment, the contacting step further comprises contacting the cell with an HSC self-renewal agonist, e.g., UM171 ((1r,4r)-N1-(2-benzyl-7-(2-methyl-2H-tetrazol-5-yl)-9H-pyrimido[4,5-b]indol-4-yl)cyclohexane-1,4-diamine) or a pyrimidoindole derivative described in Fares et al., Science, 2014, 345(6203): 1509-1512). In an embodiment, the cell is contacted with the HSC self-reneal agonist before (e.g., at least 1, 2, 4, 8, 12, 24, 36, or 48 hours before, e.g., about 2 hours before) the cell is contacted with a gRNA molecule and/or a Cas9 molecule. In another embodiment, the cell is contacted with the HSC self-reneal agonist after (e.g., at least 1, 2, 4, 8, 12, 24, 36, or 48 hours after, e.g., about 24 hours after) the cell is contacted with a gRNA molecule and/or a Cas9 molecule. In yet another embodiment, the cell is contacted with the HSC self-reneal agonist before (e.g., at least 1, 2, 4, 8, 12, 24, 36, or 48 hours before) and after (e.g., at least 1, 2, 4, 8, 12, 24, 36, or 48 hours after) the cell is contacted with a gRNA molecule and/or a Cas9 molecule. In an embodiment, the cell is contacted with the HSC self-reneal agonist about 2 hours before and about 24 hours after the cell is contacted with a gRNA molecule and/or a Cas9 molecule. In an embodiment, the cell is contacted with the HSC self-reneal agonist at the same time the cell is contacted with a gRNA molecule and/or a Cas9 molecule. In an embodiment, the HSC self-renewal agonist, e.g., UM171, is used at a concentration between 5 and 200 nM, e.g., between 10 and 100 nM or between 20 and 50 nM, e.g., about 40 nM.

[0137] In another aspect, disclosed herein is a cell or a population of cells produced (e.g., altered) by a method described herein.

[0138] In another aspect, disclosed herein is a method of treating a subject suffering from or likely to develop an HIV infection or AIDS, e.g., altering the structure, e.g., sequence, of a target nucleic acid of the subject, comprising contacting the subject (or a cell from the subject) with:

[0139] (a) a gRNA that targets the CCR5 gene, e.g., a gRNA disclosed herein;

[0140] (b) a Cas9 molecule, e.g., a Cas9 molecule disclosed herein; and

[0141] optionally, (c)(i) a second gRNA that targets the CCR5 gene, e.g., a second gRNA disclosed herein, and

[0142] further optionally, (c)(ii) a third gRNA, and still further optionally, (c)(iii) a fourth gRNA that target the CCR5 gene, e.g., a third and fourth gRNA disclosed herein.

[0143] In some embodiments, contacting comprises contacting with (a) and (b).

[0144] In some embodiments, contacting comprises contacting with (a), (b), and (c)(i). In some embodiments, contacting comprises contacting with (a), (b), (c)(i) and (c)(ii). In some embodiments, contacting comprises contacting with (a), (b), (c)(i), (c)(ii) and (c)(iii).

[0145] The gRNA of (a) or (c) (e.g., (c)(i), (c)(ii), or (c)(iii)) may be selected from any of Tables 1A-1F, 2A-2C, 3A-3E, 4A-4C, 5A-5C, 6A-6E, 7A-7C, or 18, or a gRNA that differs by no more than 1, 2, 3, 4, or 5 nucleotides from, a targeting domain sequence from any of Tables 1A-1F, 2A-2C, 3A-3E, 4A-4C, 5A-5C, 6A-6E, 7A-7C, or 18.

[0146] In an embodiment, the method comprises acquiring knowledge of the presence or absence of a mutation at a CCR5 target position in said subject.

[0147] In an embodiment, the method comprises acquiring knowledge of the presence or absence of a mutation at a CCR5 target position in said subject by sequencing the CCR5 gene or a portion of the CCR5 gene.

[0148] In an embodiment, the method comprises introducing a mutation at a CCR5 target position.

[0149] In an embodiment, the method comprises introducing a mutation at a CCR5 target position by NHEJ.

[0150] When the method comprises introducing a mutation at a CCR5 target position, e.g., by NHEJ in the coding region or a non-coding region, a Cas9 of (b) and at least one guide RNA (e.g., a guide RNA of (a)) are included in the contacting step.

[0151] In an embodiment, a cell of the subject is contacted ex vivo with (a), (b) and optionally (c)(i), further optionally (c)(ii), and still further optionally (c)(iii). In an embodiment, said cell is returned to the subject's body.

[0152] In an embodiment, a cell of the subject is contacted is in vivo with (a), (b) and optionally (c)(i), further optionally (c)(ii), and still further optionally (c)(iii). In an embodiment, the cell of the subject is contacted in vivo by intravenous delivery of (a), (b) and optionally (c)(i), further optionally (c)(ii), and still further optionally (c)(iii).

[0153] In an embodiment, the contacting step comprises contacting the subject with a nucleic acid, e.g., a vector, e.g., an AAV vector, described herein, e.g., a nucleic acid that encodes at least one of (a), (b), and optionally (c)(i), further optionally (c)(ii), and still further optionally (c)(iii).

[0154] In an embodiment, the contacting step comprises delivering to said subject said Cas9 molecule of (b), as a protein or mRNA, and a nucleic acid which encodes (a) and optionally (c)(i), further optionally (c)(ii), and still further optionally (c)(iii).

[0155] In an embodiment, the contacting step comprises delivering to the subject the Cas9 molecule of (b), as a protein or mRNA, said gRNA of (a), as an RNA, and optionally said second gRNA of (c)(i), further optionally said third gRNA of (c)(ii), and still further optionally said fourth gRNA of (c)(iii), as an RNA.

[0156] In an embodiment, the contacting step comprises delivering to the subject the gRNA of (a), as an RNA, optionally said second gRNA of (c)(i), further optionally said third gRNA of (c)(ii), and still further optionally said fourth gRNA of (c)(iii), as an RNA, and a nucleic acid that encodes the Cas9 molecule of (b).

[0157] In another aspect, disclosed herein is a reaction mixture comprising a gRNA molecule, a nucleic acid, or a composition described herein, and a cell, e.g., a cell from a subject having, or likely to develop and HIV infection or AIDS, or a subject having a mutation at a CCR5 target position (e.g., a heterozygous carrier of a CCR5 mutation).

[0158] In another aspect, disclosed herein is a kit comprising, (a) a gRNA molecule described herein, or a nucleic acid that encodes the gRNA, and one or more of the following:

[0159] (b) a Cas9 molecule, e.g., a Cas9 molecule described herein, or a nucleic acid or mRNA that encodes the Cas9;

[0160] (c)(i) a second gRNA molecule, e.g., a second gRNA molecule described herein or a nucleic acid that encodes (c)(i);

[0161] (c)(ii) a third gRNA molecule, e.g., a third gRNA molecule described herein or a nucleic acid that encodes (c)(ii);

[0162] (c)(iii) a fourth gRNA molecule, e.g., a fourth gRNA molecule described herein or a nucleic acid that encodes (c)(iii).

[0163] In an embodiment, the kit comprises a nucleic acid, e.g., an AAV vector, that encodes one or more of (a), (b), (c)(i), (c)(ii), and (c)(iii).

[0164] In yet another aspect, disclosed herein is a gRNA molecule, e.g., a gRNA molecule described herein, for use in treating, or delaying the onset or progression of, HIV infection or

[0165] AIDS in a subject, e.g., in accordance with a method of treating, or delaying the onset or progression of, HIV infection or AIDS as described herein.

[0166] In an embodiment, the gRNA molecule in used in combination with a Cas9 molecule, e.g., a Cas9 molecule described herein. Additionally or alternatively, in an embodiment, the gRNA molecule is used in combination with a second, third and/or fourth gRNA molecule, e.g., a second, third and/or fourth gRNA molecule described herein.

[0167] In still another aspect, disclosed herein is use of a gRNA molecule, e.g., a gRNA molecule described herein, in the manufacture of a medicament for treating, or delaying the onset or progression of, HIV infection or AIDS in a subject, e.g., in accordance with a method of treating, or delaying the onset or progression of, HIV infection or AIDS as described herein.

[0168] In an embodiment, the medicament comprises a Cas9 molecule, e.g., a Cas9 molecule described herein. Additionally or alternatively, in an embodiment, the medicament comprises a second, third and/or fourth gRNA molecule, e.g., a second, third and/or fourth gRNA molecule described herein.

[0169] The gRNA molecules and methods, as disclosed herein, can be used in combination with a governing gRNA molecule. As used herein, a governing gRNA molecule refers to a gRNA molecule comprising a targeting domain which is complementary to a target domain on a nucleic acid that encodes a component of the CRISPR/Cas system introduced into a cell or subject. For example, the methods described herein can further include contacting a cell or subject with a governing gRNA molecule or a nucleic acid encoding a governing molecule. In an embodiment, the governing gRNA molecule targets a nucleic acid that encodes a Cas9 molecule or a nucleic acid that encodes a target gene gRNA molecule. In an embodiment, the governing gRNA comprises a targeting domain that is complementary to a target domain in a sequence that encodes a Cas9 component, e.g., a Cas9 molecule or target gene gRNA molecule. In an embodiment, the target domain is designed with, or has, minimal homology to other nucleic acid sequences in the cell, e.g., to minimize off-target cleavage. For example, the targeting domain on the governing gRNA can be selected to reduce or minimize off-target effects. In an embodiment, a target domain for a governing gRNA can be disposed in the control or coding region of a Cas9 molecule or disposed between a control region and a transcribed region. In an embodiment, a target domain for a governing gRNA can be disposed in the control or coding region of a target gene gRNA molecule or disposed between a control region and a transcribed region for a target gene gRNA. While not wishing to be bound by theory, in an embodiment, it is believed that altering, e.g., inactivating, a nucleic acid that encodes a Cas9 molecule or a nucleic acid that encodes a target gene gRNA molecule can be effected by cleavage of the targeted nucleic acid sequence or by binding of a Cas9 molecule/governing gRNA molecule complex to the targeted nucleic acid sequence.

[0170] The compositions, reaction mixtures and kits, as disclosed herein, can also include a governing gRNA molecule, e.g., a governing gRNA molecule disclosed herein.

[0171] Unless otherwise defined, all technical and scientific terms used herein have the same meaning as commonly understood by one of ordinary skill in the art to which this invention belongs. Although methods and materials similar or equivalent to those described herein can be used in the practice or testing of the present invention, suitable methods and materials are described below. All publications, patent applications, patents, and other references mentioned herein are incorporated by reference in their entirety. In addition, the materials, methods, and examples are illustrative only and not intended to be limiting.

[0172] Headings, including numeric and alphabetical headings and subheadings, are for organization and presentation and are not intended to be limiting.

[0173] Other features and advantages of the invention will be apparent from the detailed description, drawings, and from the claims.

### BRIEF DESCRIPTION OF THE DRAWINGS

[0174] FIGS. 1A-1I are representations of several exemplary gRNAs.

[0175] FIG. 1A depicts a modular gRNA molecule derived in part (or modeled on a sequence in part) from Streptococcus pyogenes (S. pyogenes) as a duplexed structure (SEQ ID NOS: 42 and 43, respectively, in order of appearance);

[0176] FIG. 1B depicts a unimolecular (or chimeric) gRNA molecule derived in part from S. pyogenes as a duplexed structure (SEQ ID NO: 44);

[0177] FIG. 1C depicts a unimolecular gRNA molecule derived in part from S. pyogenes as a duplexed structure (SEQ ID NO: 45);

[0178] FIG. 1D depicts a unimolecular gRNA molecule derived in part from S. pyogenes as a duplexed structure (SEQ ID NO: 46);

[0179] FIG. 1E depicts a unimolecular gRNA molecule derived in part from S. pyogenes as a duplexed structure (SEQ ID NO: 47);

[0180] FIG. 1F depicts a modular gRNA molecule derived in part from Streptococcus thermophilus (S. thermophilus) as a duplexed structure (SEQ ID NOS: 48 and 49, respectively, in order of appearance);

[0181] FIG. 1G depicts an alignment of modular gRNA molecules of S. pyogenes and S. thermophilus (SEQ ID NOS: 50-53, respectively, in order of appearance).

[0182] FIGS. 1H-1I depicts additional exemplary structures of unimolecular gRNA molecules. FIG. 1H shows an exemplary structure of a unimolecular gRNA molecule derived in part from S. pyogenes as a duplexed structure (SEQ ID NO: 45). FIG. 1I shows an exemplary structure of a unimolecular gRNA molecule derived in part from S. aureus as a duplexed structure (SEQ ID NO: 40).

[0183] FIGS. 2A-2G depict an alignment of Cas9 sequences from Chylinski et al. (RNA Biol. 2013; 10(5): 726-737). The N-terminal RuvC-like domain is boxed and indicated with a “Y”. The other two RuvC-like domains are boxed and indicated with a “B”. The HNH-like domain is boxed and indicated by a “G”. Sm: S. mutans (SEQ ID NO: 1); Sp: S. pyogenes (SEQ ID NO: 2); St: S. thermophilus (SEQ ID NO: 3); Li: L. innocua (SEQ ID NO: 4). Motif: this is a motif based on the four sequences: residues conserved in all four sequences are indicated by single letter amino acid abbreviation; “*” indicates any amino acid found in the corresponding position of any of the four sequences; and “-” indicates any amino acid, e.g., any of the 20 naturally occurring amino acids, or absent.

[0184] FIGS. 3A-3B show an alignment of the N-terminal RuvC-like domain from the Cas9 molecules disclosed in Chylinski et at (SEQ ID NOS: 54-103, respectively, in order of appearance). The last line of FIG. 3B identifies 4 highly conserved residues.

[0185] FIGS. 4A-4B show an alignment of the N-terminal RuvC-like domain from the Cas9 molecules disclosed in Chylinski et al. with sequence outliers removed (SEQ ID NOS: 104-177, respectively, in order of appearance). The last line of FIG. 4B identifies 3 highly conserved residues.

[0186] FIGS. 5A-5C show an alignment of the HNH-like domain from the Cas9 molecules disclosed in Chylinski et at (SEQ ID NOS: 178-252, respectively, in order of appearance). The last line of FIG. 5C identifies conserved residues.

[0187] FIGS. 6A-6B show an alignment of the HNH-like domain from the Cas9 molecules disclosed in Chylinski et al. with sequence outliers removed (SEQ ID NOS: 253-302, respectively, in order of appearance). The last line of FIG. 6B identifies 3 highly conserved residues.

[0188] FIGS. 7A-7B depict an alignment of Cas9 sequences from S. pyogenes and Neisseria meningitidis (N. meningitidis). The N-terminal RuvC-like domain is boxed and indicated with a “Y”. The other two RuvC-like domains are boxed and indicated with a “B”. The HNH-like domain is boxed and indicated with a “G”. Sp: S. pyogenes; Nm: N. meningitidis. Motif: this is a motif based on the two sequences: residues conserved in both sequences are indicated by a single amino acid designation; “*” indicates any amino acid found in the corresponding position of any of the two sequences; “-” indicates any amino acid, e.g., any of the 20 naturally occurring amino acids, and “-” indicates any amino acid, e.g., any of the 20 naturally occurring amino acids, or absent.

[0189] FIG. 8 shows a nucleic acid sequence encoding Cas9 of N. meningitidis (SEQ ID NO: 303). Sequence indicated by an “R” is an SV40 NLS; sequence indicated as “G” is an HA tag; and sequence indicated by an “O” is a synthetic NLS sequence; the remaining (unmarked) sequence is the open reading frame (ORF).

[0190] FIGS. 9A-9B are schematic representations of the domain organization of S. pyogenes Cas 9. FIG. 9A shows the organization of the Cas9 domains, including amino acid positions, in reference to the two lobes of Cas9 (recognition (REC) and nuclease (NUC) lobes). FIG. 9B shows the percent homology of each domain across 83 Cas9 orthologs.

[0191] FIG. 10 depicts the efficiency of NHEJ mediated by a Cas9 molecule and exemplary gRNA molecules targeting the CCR5 locus.

[0192] FIG. 11 depicts flow cytometry analysis of genome edited HSCs to determine co-expression of stem cell phenotypic markers CD34 and CD90 and for viability (7-AAD-AnnexinV− cells). CD34+ HSCs maintain phenotype and viability after Nucleofection™ with Cas9 and CCR5 gRNA plasmid DNA (96 hours).

### DETAILED DESCRIPTION

### Definitions

[0193] “CCR5 target position”, as used herein, refers to any position that results in inactivation of the CCR5 gene. In an embodiment, a CCR5 target position refers to any of a CCR5 target knockout position or a CCR5 target knockdown position, as described herein.

[0194] “Domain”, as used herein, is used to describe segments of a protein or nucleic acid. Unless otherwise indicated, a domain is not required to have any specific functional property.

[0195] Calculations of homology or sequence identity between two sequences (the terms are used interchangeably herein) are performed as follows. The sequences are aligned for optimal comparison purposes (e.g., gaps can be introduced in one or both of a first and a second amino acid or nucleic acid sequence for optimal alignment and non-homologous sequences can be disregarded for comparison purposes). The optimal alignment is determined as the best score using the GAP program in the GCG software package with a Blossum 62 scoring matrix with a gap penalty of 12, a gap extend penalty of 4, and a frame shift gap penalty of 5. The amino acid residues or nucleotides at corresponding amino acid positions or nucleotide positions are then compared. When a position in the first sequence is occupied by the same amino acid residue or nucleotide as the corresponding position in the second sequence, then the molecules are identical at that position. The percent identity between the two sequences is a function of the number of identical positions shared by the sequences.

[0196] “Governing gRNA molecule”, as used herein, refers to a gRNA molecule that comprises a targeting domain that is complementary to a target domain on a nucleic acid that comprises a sequence that encodes a component of the CRISPR/Cas system that is introduced into a cell or subject. A governing gRNA does not target an endogenous cell or subject sequence. In an embodiment, a governing gRNA molecule comprises a targeting domain that is complementary with a target sequence on: (a) a nucleic acid that encodes a Cas9 molecule; (b) a nucleic acid that encodes a gRNA which comprises a targeting domain that targets the CCR5 gene (a target gene gRNA); or on more than one nucleic acid that encodes a CRISPR/Cas component, e.g., both (a) and (b). In an embodiment, a nucleic acid molecule that encodes a CRISPR/Cas component, e.g., that encodes a Cas9 molecule or a target gene gRNA, comprises more than one target domain that is complementary with a governing gRNA targeting domain. While not wishing to be bound by theory, in an embodiment, it is believed that a governing gRNA molecule complexes with a Cas9 molecule and results in Cas9 mediated inactivation of the targeted nucleic acid, e.g., by cleavage or by binding to the nucleic acid, and results in cessation or reduction of the production of a CRISPR/Cas system component. In an embodiment, the Cas9 molecule forms two complexes: a complex comprising a Cas9 molecule with a target gene gRNA, which complex will alter the CCR5 gene; and a complex comprising a Cas9 molecule with a governing gRNA molecule, which complex will act to prevent further production of a CRISPR/Cas system component, e.g., a Cas9 molecule or a target gene gRNA molecule. In an embodiment, a governing gRNA molecule/Cas9 molecule complex binds to or promotes cleavage of a control region sequence, e.g., a promoter, operably linked to a sequence that encodes a Cas9 molecule, a sequence that encodes a transcribed region, an exon, or an intron, for the Cas9 molecule. In an embodiment, a governing gRNA molecule/Cas9 molecule complex binds to or promotes cleavage of a control region sequence, e.g., a promoter, operably linked to a gRNA molecule, or a sequence that encodes the gRNA molecule. In an embodiment, the governing gRNA, e.g., a Cas9-targeting governing gRNA molecule, or a target gene gRNA-targeting governing gRNA molecule, limits the effect of the Cas9 molecule/target gene gRNA molecule complex-mediated gene targeting. In an embodiment, a governing gRNA places temporal, level of expression, or other limits, on activity of the Cas9 molecule/target gene gRNA molecule complex. In an embodiment, a governing gRNA reduces off-target or other unwanted activity. In an embodiment, a governing gRNA molecule inhibits, e.g., entirely or substantially entirely inhibits, the production of a component of the Cas9 system and thereby limits, or governs, its activity.

[0197] “Modulator”, as used herein, refers to an entity, e.g., a drug, that can alter the activity (e.g., enzymatic activity, transcriptional activity, or translational activity), amount, distribution, or structure of a subject molecule or genetic sequence. In an embodiment, modulation comprises cleavage, e.g., breaking of a covalent or non-covalent bond, or the forming of a covalent or non-covalent bond, e.g., the attachment of a moiety, to the subject molecule. In an embodiment, a modulator alters the, three dimensional, secondary, tertiary, or quaternary structure, of a subject molecule. A modulator can increase, decrease, initiate, or eliminate a subject activity.

[0198] “Large molecule”, as used herein, refers to a molecule having a molecular weight of at least 2, 3, 5, 10, 20, 30, 40, 50, 60, 70, 80, 90, or 100 kD. Large molecules include proteins, polypeptides, nucleic acids, biologics, and carbohydrates.

[0199] “Polypeptide”, as used herein, refers to a polymer of amino acids having less than 100 amino acid residues. In an embodiment, it has less than 50, 20, or 10 amino acid residues.

[0200] “Reference molecule”, e.g., a reference Cas9 molecule or reference gRNA, as used herein, refers to a molecule to which a subject molecule, e.g., a subject Cas9 molecule of subject gRNA molecule, e.g., a modified or candidate Cas9 molecule is compared. For example, a Cas9 molecule can be characterized as having no more than 10% of the nuclease activity of a reference Cas9 molecule. Examples of reference Cas9 molecules include naturally occurring unmodified Cas9 molecules, e.g., a naturally occurring Cas9 molecule such as a Cas9 molecule of S. pyogenes, S. aureus or S. thermophilus. In an embodiment, the reference Cas9 molecule is the naturally occurring Cas9 molecule having the closest sequence identity or homology with the Cas9 molecule to which it is being compared. In an embodiment, the reference Cas9 molecule is a sequence, e.g., a naturally occurring or known sequence, which is the parental form on which a change, e.g., a mutation has been made.

[0201] “Replacement”, or “replaced”, as used herein with reference to a modification of a molecule does not require a process limitation but merely indicates that the replacement entity is present.

[0202] “Small molecule”, as used herein, refers to a compound having a molecular weight less than about 2 kD, e.g., less than about 2 kD, less than about 1.5 kD, less than about 1 kD, or less than about 0.75 kD.

[0203] “Subject”, as used herein, may mean either a human or non-human animal. The term includes, but is not limited to, mammals (e.g., humans, other primates, pigs, rodents (e.g., mice and rats or hamsters), rabbits, guinea pigs, cows, horses, cats, dogs, sheep, and goats). In an embodiment, the subject is a human. In other embodiments, the subject is poultry.

[0204] “Treat”, “treating” and “treatment”, as used herein, mean the treatment of a disease in a mammal, e.g., in a human, including (a) inhibiting the disease, i.e., arresting or preventing its development; (b) relieving the disease, i.e., causing regression of the disease state; and (c) curing the disease.

[0205] “Prevent”, “preventing” and “prevention”, as used herein, means the prevention of a disease in a mammal, e.g., in a human, including (a) avoiding or precluding the disease; (2) affecting the predisposition toward the disease, e.g., preventing at least one symptom of the disease or to delay onset of at least one symptom of the disease.

[0206] “X” as used herein in the context of an amino acid sequence, refers to any amino acid (e.g., any of the twenty natural amino acids) unless otherwise specified.

### Human Immunodeficiency Virus

[0207] Human Immunodeficiency Virus (HIV) is a virus that causes severe immunodeficiency. In the United States, more than 1 million people are infected with the virus. Worldwide, approximately 30-40 million people are infected.

[0208] HIV is a single-stranded RNA virus that preferentially infects CD4 cells. The virus binds to receptors on the surface of CD4+ cells to enter and infect these cells. This binding and infection step is vital to the pathogenesis of HIV. The virus attaches to the CD4 receptor on the cell surface via its own surface glycoproteins, gp120 and gp41. These proteins are made from the cleavage product of gp160. Gp120 binds to a CD4 receptor and must also bind to another coreceptor in order for the virus to enter the host cell. In macrophage-(M-tropic) viruses, the coreceptor is CCR5 occasionally referred to as the CCR5 receptor. M-tropic virus is found most commonly in the early stages of HIV infection.

[0209] There are two types of HIV—HIV-1 and HIV-2. HIV-1 is the predominant global form and is a more virulent strain of the virus. HIV-2 has lower rates of infection and, at present, predominantly affects populations in West Africa. HIV is transmitted primarily through sexual exposure, although the sharing of needles in intravenous drug use is another mode of transmission.

[0210] As HIV infection progresses, the virus infects CD4 cells and a subject's CD4 counts fall. With declining CD4 counts, a subject is subject to increasing risk of opportunistic infections (OI). Severely declining CD4 counts are associated with a very high likelihood of OIs, specific cancers (such as Kaposi's sarcoma, Burkitt's lymphoma) and wasting syndrome. Normal CD4 counts are between 600-1200 cells/microliter.

[0211] Untreated HIV infection is a chronic, progressive disease that leads to acquired immunodeficiency syndrome (AIDS) and death in the vast majority of subjects. Diagnosis of AIDS is made based on infection with a variety of opportunistic pathogens, presence of certain cancers and/or CD4 counts below 200 cells/μL.

[0212] HIV was untreatable and invariably led to death until the late 1980's. Since then, antiretroviral therapy (ART) has dramatically slowed the course of HIV infection. Highly active antiretroviral therapy (HAART) is the use of three or more agents in combination to slow HIV. Antiretroviral therapy (ART) is indicated in a subject whose CD4 counts has dropped below 500 cells/μL. Viral load is the most common measurement of the efficacy of HIV treatment and disease progression. Viral load measures the amount of HIV RNA present in the blood.

[0213] Treatment with HAART has significantly altered the life expectancy of those infected with HIV. A subject in the developed world who maintains their HAART regimen can expect to live into their 60's and possibly 70's. However, HAART regimens are associated with significant, long term side effects. First, the dosing regimens are complex and associated with strict food requirements. Compliance rates with dosing can be lower than 50% in some populations in the United States. In addition, there are significant toxicities associated with HAART treatment, including diabetes, nausea, malaise, sleep disturbances. A subject who does not adhere to dosing requirements of HAART therapy may have return of viral load in their blood and are at risk for progression to disease and its associated complications.

### Methods to Treat or Prevent HIV Infection or AIDS

[0214] Methods and compositions described herein provide for a therapy, e.g., a one-time therapy, or a multi-dose therapy, that prevents or treats HIV infection and/or AIDS. In an embodiment, a disclosed therapy prevents, inhibits, or reduces the entry of HIV into CD4 cells of a subject who is already infected. While not wishing to be bound by theory, in an embodiment, it is believed that knocking out CCR5 on CD4 cells, renders the HIV virus unable to enter CD4 cells. Viral entry into CD4 cells requires interaction of the viral glycoproteins gp41 and gp120 with both the CD4 receptor and acoreceptor, e.g., CCR5. Once a functional coreceptor such as CCR5 has been eliminated from the surface of the CD4 cells, the virus is prevented from binding and entering the host CD4 cells. In an embodiment, the disease does not progress or has delayed progression compared to a subject who has not received the therapy.

[0215] While not wishing to be bound by theory, subjects with naturally occurring CCR5 receptor mutations who have delayed HIV progression may confer protection by the mechanism of action described herein. Subjects with a specific deletion in the CCR5 gene (e.g., the delta 32 deletion) have been shown to have much higher likelihood of being long-term non-progressors (meaning they did not require HAART and their HIV infection did not progress). See, e.g., Stewart G J et al., 1997 The Australian Long-Term Non-Progressor Study Group. Aids. 11:1833-1838. In addition, a subject who was CCR5+ (had a wild type CCR5 receptor) and infected with HIV underwent a bone marrow transplant for acute myeloid lymphoma. See, e.g., Hutter G et al., 2009N ENGL J MED. 360:692-698. The bone marrow transplant (BMT) was from a subject homozygous for a CCR5 delta 32 deletion. Following BMT, the subject did not have progression of HIV and did not require treatment with ART. These subjects offer evidence for the fact that introduction of a protective mutation of the CCR5 gene, or knockout or knockdown of the CCR5 gene prevents, delays or diminishes the ability of HIV to infect the subject. Mutation or deletion of the CCR5 gene, or reduced CCR5 gene expression, should therefore reduce the progression, virulence and pathology of HIV. In an embodiment, a method described herein is used to treat a subject having HIV.

[0216] In an embodiment, a method described herein is used to treat a subject having AIDS.

[0217] In an embodiment, a method described herein is used to prevent, or delay the onset or progression of, HIV infection and AIDS in a subject at high risk for HIV infection.

[0218] In an embodiment, a method described herein results in a selective advantage to survival of treated CD4 cells. Some proportion of CD4 cells will be modified and have a CCR5 protective mutation. These cells are not subject to infection with HIV. Cells that are not modified may be infected with HIV and are expected to undergo cell death. In an embodiment, after the treatment described herein, treated cells survive, while untreated cells die. This selective advantage drives eventual colonization in all body compartments with 100% CCR5-negative CD4 cells derived from treated cells, conferring complete protection in treated subjects against infection with M tropic HIV.

[0219] In an embodiment, the method comprises initiating treatment of a subject prior to disease onset.

[0220] In an embodiment, the method comprises initiating treatment of a subject after disease onset.

[0221] In an embodiment, the method comprises initiating treatment of a subject after disease onset, e.g., 1, 2, 3, 4, 5, 6, 7, 8, 9, 10, 12, 16, 24, 36, 48 or more months after onset of HIV infection or AIDS. While not wishing to be bound by theory, it is believed that this may be effective as disease progression is slow in some cases and a subject may present well into the course of illness.

[0222] In an embodiment, the method comprises initiating treatment of a subject in an advanced stage of disease, e.g., to slow viral replication and viral load.

[0223] Overall, initiation of treatment for a subject at all stages of disease is expected to prevent or reduce disease progression and benefit a subject.

[0224] In an embodiment, the method comprises initiating treatment of a subject prior to disease onset and prior to infection with HIV.

[0225] In an embodiment, the method comprises initiating treatment of a subject in an early stage of disease, e.g., when a subject has tested positive for HIV infection but has no signs or symptoms associated with HIV.

[0226] In an embodiment, the method comprises initiating treatment of a patient at the appearance of a reduced CD4 count or a positive HIV test.

[0227] In an embodiment, the method comprises treating a subject considered at risk for developing HIV infection.

[0228] In an embodiment, the method comprises treating a subject who is the spouse, partner, sexual partner, newborn, infant, or child of a subject with HIV.

[0229] In an embodiment, the method comprises treating a subject for the prevention or reduction of HIV infection.

[0230] In an embodiment, the method comprises treating a subject at the appearance of any of the following findings consistent with HIV: low CD4 count; opportunistic infections associated with HIV, including but not limited to: candidiasis, mycobacterium tuberculosis, cryptococcosis, cryptosporidiosis, cytomegalovirus; and/or malignancy associated with HIV, including but not limited to: lymphoma, Burkitt's lymphoma, or Kaposi's sarcoma.

[0231] In an embodiment, a cell is treated ex vivo and returned to a patient.

[0232] In an embodiment, an autologous CD4 cell can be treated ex vivo and returned to the subject.

[0233] In an embodiment, a heterologous CD4 cells can be treated ex vivo and transplanted into the subject.

[0234] In an embodiment, an autologous stem cell can be treated ex vivo and returned to the subject.

[0235] In an embodiment, a heterologous stem cell can be treated ex vivo and transplanted into the subject.

[0236] In an embodiment, the treatment comprises delivery of gRNA by intravenous injection, intramuscular injection; subcutaneous injection; intrathecal injection; or intraventricular injection.

[0237] In an embodiment, the treatment comprises delivery of a gRNA by an AAV.

[0238] In an embodiment, the treatment comprises delivery of a gRNA by a lentivirus.

[0239] In an embodiment, the treatment comprises delivery of a gRNA by a nanoparticle.

[0240] In an embodiment, the treatment comprises delivery of a gRNA by a parvovirus, e.g., a specifically a modified parvovirus designed to target bone marrow cells and/or CD4 cells.

[0241] In an embodiment, the treatment is initiated after a subject is determined to not have a mutation (e.g., an inactivating mutation, e.g., an inactivating mutation in either or both alleles) in CCR5 by genetic screening, e.g., genotyping, wherein the genetic testing was performed prior to or after disease onset.

### Methods of Targeting CCR5

[0242] As disclosed herein, the CCR5 gene can be targeted (e.g., altered) by gene editing, e.g., using CRISPR-Cas9 mediated methods as described herein.

[0243] Methods and compositions discussed herein, provide for targeting (e.g., altering) a CCR5 target position in the CCR5 gene. A CCR5 target position can be targeted (e.g., altered) by gene editing, e.g., using CRISPR-Cas9 mediated methods to target (e.g. alter) the CCR5 gene.

[0244] Disclosed herein are methods for targeting (e.g., altering) a CCR5 target position in the CCR5 gene. Targeting (e.g., altering) the CCR5 target position is achieved, e.g., by:

[0245] (1) knocking out the CCR5 gene:

[0246] (a) insertion or deletion (e.g., NHEJ-mediated insertion or deletion) of one or more nucleotides in close proximity to or within the early coding region of the CCR5 gene, or

[0247] (b) deletion (e.g., NHEJ-mediated deletion) of a genomic sequence including at least a portion of the CCR5 gene, or

[0248] (2) knocking down the CCR5 gene mediated by enzymatically inactive Cas9 (eiCas9) molecule or an eiCas9-fusion protein by targeting non-coding region, e.g., a promoter region, of the gene.

[0249] All approaches give rise to targeting (e.g., alteration) of the CCR5 gene.

[0250] In one embodiment, methods described herein introduce one or more breaks near the early coding region in at least one allele of the CCR5 gene. In another embodiment, methods described herein introduce two or more breaks to flank at least a portion of the CCR5 gene. The two or more breaks remove (e.g., delete) a genomic sequence including at least a portion of the CCR5 gene. In another embodiment, methods described herein comprise knocking down the CCR5 gene mediated by enzymatically inactive Cas9 (eiCas9) molecule or an eiCas9-fusion protein by targeting the promoter region of CCR5 target knockdown position. All methods described herein result in targeting (e.g., alteration) of the CCR5 gene.

[0251] The targeting (e.g., alteration) of the CCR5 gene can be mediated by any mechanism. Exemplary mechanisms that can be associated with the alteration of the CCR5 gene include, but are not limited to, non-homologous end joining (e.g., classical or alternative), microhomology-mediated end joining (MMEJ), homology-directed repair (e.g., endogenous donor template mediated), SDSA (synthesis dependent strand annealing), single strand annealing or single strand invasion.

### Knocking Out CCR5 by Introducing an Indel or a Deletion in the CCR5 Gene

[0252] In an embodiment, the method comprises introducing an insertion or deletion of one more nucleotides in close proximity to the CCR5 target knockout position (e.g., the early coding region) of the CCR5 gene. As described herein, in one embodiment, the method comprises the introduction of one or more breaks (e.g., single strand breaks or double strand breaks) sufficiently close to (e.g., either 5′ or 3′ to) the early coding region of the CCR5 target knockout position, such that the break-induced indel could be reasonably expected to span the CCR5 target knockout position (e.g., the early coding region). While not wishing to be bound by theory, it is believed that NHEJ-mediated repair of the break(s) allows for the NHEJ-mediated introduction of an indel in close proximity to within the early coding region of the CCR5 target knockout position.

[0253] In an embodiment, the method comprises introducing a deletion of a genomic sequence comprising at least a portion of the CCR5 gene. As described herein, in an embodiment, the method comprises the introduction of two double stand breaks—one 5′ and the other 3′ to (i.e., flanking) the CCR5 target position. In an embodiment, two gRNAs, e.g., unimolecular (or chimeric) or modular gRNA molecules, are configured to position the two double strand breaks on opposite sides of the CCR5 target knockout position in the CCR5 gene.

[0254] In an embodiment, a single strand break is introduced (e.g., positioned by one gRNA molecule) at or in close proximity to a CCR5 target position in the CCR5 gene. In an embodiment, a single gRNA molecule (e.g., with a Cas9 nickase) is used to create a single strand break at or in close proximity to the CCR5 target position, e.g., the gRNA is configured such that the single strand break is positioned either upstream (e.g., within 500 bp upstream, e.g., within 200 bp upstream) or downstream (e.g., within 500 bp downstream, e.g., within 200 bp downstream) of the CCR5 target position. In an embodiment, the break is positioned to avoid unwanted target chromosome elements, such as repeat elements, e.g., an Alu repeat.

[0255] In an embodiment, a double strand break is introduced (e.g., positioned by one gRNA molecule) at or in close proximity to a CCR5 target position in the CCR5 gene. In an embodiment, a single gRNA molecule (e.g., with a Cas9 nuclease other than a Cas9 nickase) is used to create a double strand break at or in close proximity to the CCR5 target position, e.g., the gRNA molecule is configured such that the double strand break is positioned either upstream (e.g., within 500 bp upstream, e.g., within 200 bp upstream) or downstream of (e.g., within 500 bp downstream, e.g., within 200 bp downstream) of a CCR5 target position. In an embodiment, the break is positioned to avoid unwanted target chromosome elements, such as repeat elements, e.g., an Alu repeat.

[0256] In an embodiment, two single strand breaks are introduced (e.g., positioned by two gRNA molecules) at or in close proximity to a CCR5 target position in the CCR5 gene. In an embodiment, two gRNA molecules (e.g., with one or two Cas9 nickases) are used to create two single strand breaks at or in close proximity to the CCR5 target position, e.g., the gRNAs molecules are configured such that both of the single strand breaks are positioned e.g., within 500 by upstream, e.g., within 200 bp upstream) or downstream (e.g., within 500 bp downstream, e.g., within 200 bp downstream) of the CCR5 target position. In another embodiment, two gRNA molecules (e.g., with two Cas9 nickases) are used to create two single strand breaks at or in close proximity to the CCR5 target position, e.g., the gRNAs molecules are configured such that one single strand break is positioned upstream (e.g., within 200 bp upstream) and a second single strand break is positioned downstream (e.g., within 200 bp downstream) of the CCR5 target position. In an embodiment, the breaks are positioned to avoid unwanted target chromosome elements, such as repeat elements, e.g., an Alu repeat.

[0257] In an embodiment, two double strand breaks are introduced (e.g., positioned by two gRNA molecules) at or in close proximity to a CCR5 target position in the CCR5 gene. In an embodiment, two gRNA molecules (e.g., with one or two Cas9 nucleases that are not Cas9 nickases) are used to create two double strand breaks to flank a CCR5 target position, e.g., the gRNA molecules are configured such that one double strand break is positioned upstream (e.g., within 500 bp upstream, e.g., within 200 bp upstream) and a second double strand break is positioned downstream (e.g., within 500 bp downstream, e.g., within 200 bp downstream) of the CCR5 target position. In an embodiment, the breaks are positioned to avoid unwanted target chromosome elements, such as repeat elements, e.g., an Alu repeat.

[0258] In an embodiment, one double strand break and two single strand breaks are introduced (e.g., positioned by three gRNA molecules) at or in close proximity to a CCR5 target position in the CCR5 gene. In an embodiment, three gRNA molecules (e.g., with a Cas9 nuclease other than a Cas9 nickase and one or two Cas9 nickases) to create one double strand break and two single strand breaks to flank a CCR5 target position, e.g., the gRNA molecules are configured such that the double strand break is positioned upstream or downstream of (e.g., within 500 bp, e.g., within 200 bp upstream or downstream) of the CCR5 target position, and the two single strand breaks are positioned at the opposite site, e.g., downstream or upstream (e.g., within 500 bp, e.g., within 200 bp downstream or upstream), of the CCR5 target position. In an embodiment, the breaks are positioned to avoid unwanted target chromosome elements, such as repeat elements, e.g., an Alu repeat.

[0259] In an embodiment, four single strand breaks are introduced (e.g., positioned by four gRNA molecules) at or in close proximity to a CCR5 target position in the CCR5 gene. In an embodiment, four gRNA molecule (e.g., with one or more Cas9 nickases are used to create four single strand breaks to flank a CCR5 target position in the CCR5 gene, e.g., the gRNA molecules are configured such that a first and second single strand breaks are positioned upstream (e.g., within 500 bp upstream, e.g., within 200 bp upstream) of the CCR5 target position, and a third and a fourth single stranded breaks are positioned downstream (e.g., within 500 bp downstream, e.g., within 200 bp downstream) of the CCR5 target position. In an embodiment, the breaks are positioned to avoid unwanted target chromosome elements, such as repeat elements, e.g., an Alu repeat.

[0260] In an embodiment, two or more (e.g., three or four) gRNA molecules are used with one Cas9 molecule. In another embodiment, when two ore more (e.g., three or four) gRNAs are used with two or more Cas9 molecules, at least one Cas9 molecule is from a different species than the other Cas9 molecule(s). For example, when two gRNA molecules are used with two Cas9 molecules, one Cas9 molecule can be from one species and the other Cas9 molecule can be from a different species. Both Cas9 species are used to generate a single or double-strand break, as desired.

### Knocking Out CCR5 bp Deleting (e.g., NHEJ-Mediated Deletion) a Genomic Sequence Including at Least a Portion of the CCR5 Gene

[0261] In an embodiment, the method comprises deleting (e.g., NHEJ-mediated deletion) a genomic sequence including at least a portion of the CCR5 gene. As described herein, in one embodiment, the method comprises the introduction two sets of breaks (e.g., a pair of double strand breaks, one double strand break or a pair of single strand breaks, or two pairs of single strand breaks) to flank a region of the CCR5 gene (e.g., a coding region, e.g., an early coding region, or a non-coding region, e.g., a non-coding sequence of the CCR5 gene, e.g., a promoter, an enhancer, an intron, a 3′UTR, and/or a polyadenylation signal). While not wishing to be bound by theory, it is believed that NHEJ-mediated repair of the break(s) allows for alteration of the CCR5 gene as described herein, which reduces or eliminates expression of the gene, e.g., to knock out one or both alleles of the CCR5 gene.

[0262] In an embodiment, two double strand breaks are introduced (e.g., positioned by two gRNA molecules) at or in close proximity to a CCR5 target position in the CCR5 gene. In an embodiment, two gRNA molecules (e.g., with one or two Cas9 nucleases that are not Cas9 nickases) are used to create two double strand breaks to flank a CCR5 target position, e.g., the gRNA molecules are configured such that one double strand break is positioned upstream (e.g., within 500 bp upstream, e.g., within 200 bp upstream) and a second double strand break is positioned downstream (e.g., within 500 bp downstream, e.g., within 200 bp downstream) of the CCR5 target position. In an embodiment, the breaks are positioned to avoid unwanted target chromosome elements, such as repeat elements, e.g., an Alu repeat.

[0263] In an embodiment, one double strand break and two single strand breaks are introduced (e.g., positioned by three gRNA molecules) at or in close proximity to a CCR5 target position in the CCR5 gene. In an embodiment, three gRNA molecules (e.g., with a Cas9 nuclease other than a Cas9 nickase and one or two Cas9 nickases) to create one double strand break and two single strand breaks to flank a CCR5 target position, e.g., the gRNA molecules are configured such that the double strand break is positioned upstream or downstream of (e.g., within 500 bp, e.g., within 200 bp upstream or downstream) of the CCR5 target position, and the two single strand breaks are positioned at the opposite site, e.g., downstream or upstream (e.g., within 500 bp, e.g., within 200 bp downstream or upstream), of the CCR5 target position. In an embodiment, the breaks are positioned to avoid unwanted target chromosome elements, such as repeat elements, e.g., an Alu repeat.

[0264] In an embodiment, four single strand breaks are introduced (e.g., positioned by four gRNA molecules) at or in close proximity to a CCR5 target position in the CCR5 gene. In an embodiment, four gRNA molecule (e.g., with one or more Cas9 nickases are used to create four single strand breaks to flank a CCR5 target position in the CCR5 gene, e.g., the gRNA molecules are configured such that a first and second single strand breaks are positioned upstream (e.g., within 500 bp upstream, e.g., within 200 bp upstream) of the CCR5 target position, and a third and a fourth single stranded breaks are positioned downstream (e.g., within 500 bp downstream, e.g., within 200 bp downstream) of the CCR5 target position. In an embodiment, the breaks are positioned to avoid unwanted target chromosome elements, such as repeat elements, e.g., an Alu repeat.

[0265] In an embodiment, two or more (e.g., three or four) gRNA molecules are used with one Cas9 molecule. In another embodiment, when two ore more (e.g., three or four) gRNAs are used with two or more Cas9 molecules, at least one Cas9 molecule is from a different species than the other Cas9 molecule(s). For example, when two gRNA molecules are used with two Cas9 molecules, one Cas9 molecule can be from one species and the other Cas9 molecule can be from a different species. Both Cas9 species are used to generate a single or double-strand break, as desired.

Knocking Down CCR5 Mediated by an Enzymatically Inactive Cas9 (eiCas9) Molecule

[0266] A targeted knockdown approach reduces or eliminates expression of functional CCR5 gene product. As described herein, in an embodiment, a targeted knockdown is mediated by targeting an enzymatically inactive Cas9 (eiCas9) molecule or an eiCas9 fused to a transcription repressor domain or chromatin modifying protein to alter transcription, e.g., to block, reduce, or decrease transcription, of the CCR5 gene.

[0267] Methods and compositions discussed herein may be used to alter the expression of the CCR5 gene to treat or prevent HIV infection or AIDS by targeting a promoter region of the CCR5 gene. In an embodiment, the promoter region is targeted to knock down expression of the CCR5 gene. A targeted knockdown approach reduces or eliminates expression of functional CCR5 gene product. As described herein, in an embodiment, a targeted knockdown is mediated by targeting an enzymatically inactive Cas9 (eiCas9) or an eiCas9 fused to a transcription repressor domain or chromatin modifying protein to alter transcription, e.g., to block, reduce, or decrease transcription, of the CCR5 gene.

[0268] In an embodiment, one or more eiCas9s may be used to block binding of one or more endogenous transcription factors. In another embodiment, an eiCas9 can be fused to a chromatin modifying protein. Altering chromatin status can result in decreased expression of the target gene. One or more eiCas9s fused to one or more chromatin modifying proteins may be used to alter chromatin status.

I. gRNA Molecules

[0269] A gRNA molecule, as that term is used herein, refers to a nucleic acid that promotes the specific targeting or homing of a gRNA molecule/Cas9 molecule complex to a target nucleic acid. gRNA molecules can be unimolecular (having a single RNA molecule), sometimes referred to herein as “chimeric” gRNAs, or modular (comprising more than one, and typically two, separate RNA molecules). A gRNA molecule comprises a number of domains. The gRNA molecule domains are described in more detail below.

[0270] Several exemplary gRNA structures, with domains indicated thereon, are provided in FIG. 1. While not wishing to be bound by theory, in an embodiment, with regard to the three dimensional form, or intra- or inter-strand interactions of an active form of a gRNA, regions of high complementarity are sometimes shown as duplexes in FIGS. 1A-1G and other depictions provided herein.

[0271] In an embodiment, a unimolecular, or chimeric, gRNA comprises, preferably from 5′ to 3′:

[0272] a targeting domain (which is complementary to a target nucleic acid in the CCR5 gene, e.g., a targeting domain from any of Tables 1A-1F);

[0273] a first complementarity domain;

[0274] a linking domain;

[0275] a second complementarity domain (which is complementary to the first complementarity domain);

[0276] a proximal domain; and

[0277] optionally, a tail domain.

[0278] In an embodiment, a modular gRNA comprises:
[0279] a first strand comprising, preferably from 5′ to 3′;
   [0280] a targeting domain (which is complementary to a target nucleic acid in the CCR5 gene, e.g., a targeting domain from Tables 1A-1F); and
   [0281] a first complementarity domain; and
[0282] a second strand, comprising, preferably from 5′ to 3′:
   [0283] optionally, a 5′ extension domain;
   [0284] a second complementarity domain;
   [0285] a proximal domain; and
   [0286] optionally, a tail domain.

[0287] The domains are discussed briefly below:

[0288] The Targeting Domain

[0289] FIGS. 1A-1G provide examples of the placement of targeting domains.

[0290] The targeting domain comprises a nucleotide sequence that is complementary, e.g., at least 80, 85, 90, or 95% complementary, e.g., fully complementary, to the target sequence on the target nucleic acid. The targeting domain is part of an RNA molecule and will therefore comprise the base uracil (U), while any DNA encoding the gRNA molecule will comprise the base thymine (T). While not wishing to be bound by theory, in an embodiment, it is believed that the complementarity of the targeting domain with the target sequence contributes to specificity of the interaction of the gRNA molecule/Cas9 molecule complex with a target nucleic acid. It is understood that in a targeting domain and target sequence pair, the uracil bases in the targeting domain will pair with the adenine bases in the target sequence. In an embodiment, the target domain itself comprises in the 5′ to 3′ direction, an optional secondary domain, and a core domain. In an embodiment, the core domain is fully complementary with the target sequence. In an embodiment, the targeting domain is 5 to 50 nucleotides in length. The strand of the target nucleic acid with which the targeting domain is complementary is referred to herein as the complementary strand. Some or all of the nucleotides of the domain can have a modification, e.g., a modification found in Section VIII herein.

[0291] In an embodiment, the targeting domain is 16 nucleotides in length.

[0292] In an embodiment, the targeting domain is 17 nucleotides in length.

[0293] In an embodiment, the targeting domain is 18 nucleotides in length.

[0294] In an embodiment, the targeting domain is 19 nucleotides in length.

[0295] In an embodiment, the targeting domain is 20 nucleotides in length.

[0296] In an embodiment, the targeting domain is 21 nucleotides in length.

[0297] In an embodiment, the targeting domain is 22 nucleotides in length.

[0298] In an embodiment, the targeting domain is 23 nucleotides in length.

[0299] In an embodiment, the targeting domain is 24 nucleotides in length.

[0300] In an embodiment, the targeting domain is 25 nucleotides in length.

[0301] In an embodiment, the targeting domain is 26 nucleotides in length.

[0302] In an embodiment, the targeting domain comprises 16 nucleotides.

[0303] In an embodiment, the targeting domain comprises 17 nucleotides.

[0304] In an embodiment, the targeting domain comprises 18 nucleotides.

[0305] In an embodiment, the targeting domain comprises 19 nucleotides.

[0306] In an embodiment, the targeting domain comprises 20 nucleotides.

[0307] In an embodiment, the targeting domain comprises 21 nucleotides.

[0308] In an embodiment, the targeting domain comprises 22 nucleotides.

[0309] In an embodiment, the targeting domain comprises 23 nucleotides.

[0310] In an embodiment, the targeting domain comprises 24 nucleotides.

[0311] In an embodiment, the targeting domain comprises 25 nucleotides.

[0312] In an embodiment, the targeting domain comprises 26 nucleotides.

[0313] Targeting domains are discussed in more detail below.

[0314] The First Complementarity Domain

[0315] FIGS. 1A-1G provide examples of first complementarity domains.

[0316] The first complementarity domain is complementary with the second complementarity domain, and in an embodiment, has sufficient complementarity to the second complementarity domain to form a duplexed region under at least some physiological conditions. In an embodiment, the first complementarity domain is 5 to 30 nucleotides in length. In an embodiment, the first complementarity domain is 5 to 25 nucleotides in length. In an embodiment, the first complementary domain is 7 to 25 nucleotides in length. In an embodiment, the first complementary domain is 7 to 22 nucleotides in length. In an embodiment, the first complementary domain is 7 to 18 nucleotides in length. In an embodiment, the first complementary domain is 7 to 15 nucleotides in length. In an embodiment, the first complementary domain is 5, 6, 7, 8, 9, 10, 11, 12, 13, 14, 15, 16, 17, 18, 19, 20, 21, 22, 23, 24, or 25 nucleotides in length.

[0317] In an embodiment, the first complementarity domain comprises 3 subdomains, which, in the 5′ to 3′ direction are: a 5′ subdomain, a central subdomain, and a 3′ subdomain. In an embodiment, the 5′ subdomain is 4-9, e.g., 4, 5, 6, 7, 8 or 9 nucleotides in length. In an embodiment, the central subdomain is 1, 2, or 3, e.g., 1, nucleotide in length. In an embodiment, the 3′ subdomain is 3 to 25, e.g., 4 to 22, 4 to 18, or 4 to 10, or 3, 4, 5, 6, 7, 8, 9, 10, 11, 12, 13, 14, 15, 16, 17, 18, 19, 20, 21, 22, 23, 24, or 25 nucleotides in length.

[0318] The first complementarity domain can share homology with, or be derived from, a naturally occurring first complementarity domain. In an embodiment, it has at least 50% homology with a first complementarity domain disclosed herein, e.g., an S. pyogenes, S. aureus or S. thermophilus, first complementarity domain.

[0319] Some or all of the nucleotides of the domain can have a modification, e.g., modification found in Section VIII herein.

First complementarity domains are discussed in more detail below.

[0320] The Linking Domain

[0321] FIGS. 1A-1G provide examples of linking domains.

[0322] A linking domain serves to link the first complementarity domain with the second complementarity domain of a unimolecular gRNA. The linking domain can link the first and second complementarity domains covalently or non-covalently. In an embodiment, the linkage is covalent. In an embodiment, the linking domain covalently couples the first and second complementarity domains, see, e.g., FIGS. 1B-1E. In an embodiment, the linking domain is, or comprises, a covalent bond interposed between the first complementarity domain and the second complementarity domain. Typically the linking domain comprises one or more, e.g., 2, 3, 4, 5, 6, 7, 8, 9, or 10 nucleotides.

[0323] In modular gRNA molecules the two molecules are associated by virtue of the hybridization of the complementarity domains see e.g., FIG. 1A.

[0324] A wide variety of linking domains are suitable for use in unimolecular gRNA molecules. Linking domains can consist of a covalent bond, or be as short as one or a few nucleotides, e.g., 1, 2, 3, 4, or 5 nucleotides in length. In an embodiment, a linking domain is 2, 3, 4, 5, 6, 7, 8, 9, 10, 15, 20, or 25 or more nucleotides in length. In an embodiment, a linking domain is 2 to 50, 2 to 40, 2 to 30, 2 to 20, 2 to 10, or 2 to 5 nucleotides in length. In an embodiment, a linking domain shares homology with, or is derived from, a naturally occurring sequence, e.g., the sequence of a tracrRNA that is 5′ to the second complementarity domain. In an embodiment, the linking domain has at least 50% homology with a linking domain disclosed herein.

[0325] Some or all of the nucleotides of the domain can have a modification, e.g., modification found in Section VIII herein.

[0326] Linking domains are discussed in more detail below.

[0327] The 5′ Extension Domain

[0328] In an embodiment, a modular gRNA can comprise additional sequence, 5′ to the second complementarity domain, referred to herein as the 5′ extension domain, see, e.g., FIG. 1A. In an embodiment, the 5′ extension domain is, 2 to 10, 2 to 9, 2 to 8, 2 to 7, 2 to 6, 2 to 5, or 2 to 4 nucleotides in length. In an embodiment, the 5′ extension domain is 2, 3, 4, 5, 6, 7, 8, 9, or 10 or more nucleotides in length.

[0329] The Second Complementarity Domain

[0330] FIGS. 1A-1G provide examples of second complementarity domains.

[0331] The second complementarity domain is complementary with the first complementarity domain, and in an embodiment, has sufficient complementarity to the second complementarity domain to form a duplexed region under at least some physiological conditions. In an embodiment, e.g., as shown in FIGS. 1A-1B, the second complementarity domain can include sequence that lacks complementarity with the first complementarity domain, e.g., sequence that loops out from the duplexed region.

[0332] In an embodiment, the second complementarity domain is 5 to 27 nucleotides in length. In an embodiment, it is longer than the first complementarity region. In an embodiment the second complementary domain is 7 to 27 nucleotides in length. In an embodiment, the second complementary domain is 7 to 25 nucleotides in length. In an embodiment, the second complementary domain is 7 to 20 nucleotides in length. In an embodiment, the second complementary domain is 7 to 17 nucleotides in length. In an embodiment, the complementary domain is 5, 6, 7, 8, 9, 10, 11, 12, 13, 14, 15, 16, 17, 18, 19, 20, 21, 22, 23, 24 or 25 nucleotides in length.

[0333] In an embodiment, the second complementarity domain comprises 3 subdomains, which, in the 5′ to 3′ direction are: a 5′ subdomain, a central subdomain, and a 3′ subdomain. In an embodiment, the 5′ subdomain is 3 to 25, e.g., 4 to 22, 4 to 18, or 4 to 10, or 3, 4, 5, 6, 7, 8, 9, 10, 11, 12, 13, 14, 15, 16, 17, 18, 19, 20, 21, 22, 23, 24, or 25 nucleotides in length. In an embodiment, the central subdomain is 1, 2, 3, 4 or 5, e.g., 3, nucleotides in length. In an embodiment, the 3′ subdomain is 4 to 9, e.g., 4, 5, 6, 7, 8 or 9 nucleotides in length.

[0334] In an embodiment, the 5′ subdomain and the 3′ subdomain of the first complementarity domain, are respectively, complementary, e.g., fully complementary, with the 3′ subdomain and the 5′ subdomain of the second complementarity domain.

[0335] The second complementarity domain can share homology with or be derived from a naturally occurring second complementarity domain. In an embodiment, it has at least 50% homology with a second complementarity domain disclosed herein, e.g., an S. pyogenes, S. aureus or S. thermophilus, first complementarity domain.

[0336] Some or all of the nucleotides of the domain can have a modification, e.g., modification found in Section VIII herein.

[0337] A Proximal Domain

[0338] FIGS. 1A-1G provide examples of proximal domains.

[0339] In an embodiment, the proximal domain is 5 to 20 nucleotides in length. In an embodiment, the proximal domain can share homology with or be derived from a naturally occurring proximal domain. In an embodiment, it has at least 50% homology with a proximal domain disclosed herein, e.g., an S. pyogenes, S. aureus or S. thermophilus, proximal domain.

[0340] Some or all of the nucleotides of the domain can have a modification, e.g., modification found in Section VIII herein.

[0341] A Tail Domain

[0342] FIGS. 1A-1G provide examples of tail domains.

[0343] As can be seen by inspection of the tail domains in FIGS. 1A-1E, a broad spectrum of tail domains are suitable for use in gRNA molecules. In an embodiment, the tail domain is 0 (absent), 1, 2, 3, 4, 5, 6, 7, 8, 9, or 10 nucleotides in length. In embodiment, the tail domain nucleotides are from or share homology with sequence from the 5′ end of a naturally occurring tail domain, see e.g., FIG. 1D or FIG. 1E. In an embodiment, the tail domain includes sequences that are complementary to each other and which, under at least some physiological conditions, form a duplexed region.

[0344] In an embodiment, the tail domain is absent or is 1 to 50 nucleotides in length. In an embodiment, the tail domain can share homology with or be derived from a naturally occurring proximal tail domain. In an embodiment, it has at least 50% homology with a tail domain disclosed herein, e.g., an S. pyogenes, S. aureus or S. thermophilus, tail domain.

[0345] In an embodiment, the tail domain includes nucleotides at the 3′ end that are related to the method of in vitro or in vivo transcription. When a T7 promoter is used for in vitro transcription of the gRNA, these nucleotides may be any nucleotides present before the 3′ end of the DNA template. When a U6 promoter is used for in vivo transcription, these nucleotides may be the sequence UUUUUU. When alternate pol-III promoters are used, these nucleotides may be various numbers or uracil bases or may include alternate bases.

[0346] The domains of gRNA molecules are described in more detail below.

[0347] The Targeting Domain

[0348] The “targeting domain” of the gRNA is complementary to the “target domain” on the target nucleic acid. The strand of the target nucleic acid comprising the nucleotide sequence complementary to the core domain of the gRNA is referred to herein as the “complementary strand” of the target nucleic acid. Guidance on the selection of targeting domains can be found, e.g., in Fu Y et al., Nat Biotechnol 2014 (doi: 10.1038/nbt.2808) and Sternberg S H et al., Nature 2014 (doi: 10.1038/nature13011).

[0349] In an embodiment, the targeting domain is 16, 17, 18, 19, 20, 21, 22, 23, 24, 25 or 26 nucleotides in length.

[0350] In an embodiment, the targeting domain is 16 nucleotides in length.

[0351] In an embodiment, the targeting domain is 17 nucleotides in length.

[0352] In an embodiment, the targeting domain is 18 nucleotides in length.

[0353] In an embodiment, the targeting domain is 19 nucleotides in length.

[0354] In an embodiment, the targeting domain is 20 nucleotides in length.

[0355] In an embodiment, the targeting domain is 21 nucleotides in length.

[0356] In an embodiment, the targeting domain is 22 nucleotides in length.

[0357] In an embodiment, the targeting domain is 23 nucleotides in length.

[0358] In an embodiment, the targeting domain is 24 nucleotides in length.

[0359] In an embodiment, the targeting domain is 25 nucleotides in length.

[0360] In an embodiment, the targeting domain is 26 nucleotides in length.

[0361] In an embodiment, the targeting domain comprises 16 nucleotides.

[0362] In an embodiment, the targeting domain comprises 17 nucleotides.

[0363] In an embodiment, the targeting domain comprises 18 nucleotides.

[0364] In an embodiment, the targeting domain comprises 19 nucleotides.

[0365] In an embodiment, the targeting domain comprises 20 nucleotides.

[0366] In an embodiment, the targeting domain comprises 21 nucleotides.

[0367] In an embodiment, the targeting domain comprises 22 nucleotides.

[0368] In an embodiment, the targeting domain comprises 23 nucleotides.

[0369] In an embodiment, the targeting domain comprises 24 nucleotides.

[0370] In an embodiment, the targeting domain comprises 25 nucleotides.

[0371] In an embodiment, the targeting domain comprises 26 nucleotides.

[0372] In an embodiment, the targeting domain is 10+/−5, 20+/−5, 30+/−5, 40+/−5, 50+/−5, 60+/−5, 70+/−5, 80+/−5, 90+/−5, or 100+/−5 nucleotides, in length.

[0373] In an embodiment, the targeting domain is 20+/−5 nucleotides in length.

[0374] In an embodiment, the targeting domain is 20+/−10, 30+/−10, 40+/−10, 50+/−10, 60+/−10, 70+/−10, 80+/−10, 90+/−10, or 100+/−10 nucleotides, in length.

[0375] In an embodiment, the targeting domain is 30+/−10 nucleotides in length.

[0376] In an embodiment, the targeting domain is 10 to 100, 10 to 90, 10 to 80, 10 to 70, 10 to 60, 10 to 50, 10 to 40, 10 to 30, 10 to 20 or 10 to 15 nucleotides in length. In another embodiment, the targeting domain is 20 to 100, 20 to 90, 20 to 80, 20 to 70, 20 to 60, 20 to 50, 20 to 40, 20 to 30, or 20 to 25 nucleotides in length.

[0377] Typically the targeting domain has full complementarity with the target sequence. In an embodiment, the targeting domain has or includes 1, 2, 3, 4, 5, 6, 7 or 8 nucleotides that are not complementary with the corresponding nucleotide of the targeting domain.

[0378] In an embodiment, the target domain includes 1, 2, 3, 4 or 5 nucleotides that are complementary with the corresponding nucleotide of the targeting domain within 5 nucleotides of its 5′ end. In an embodiment, the target domain includes 1, 2, 3, 4 or 5 nucleotides that are complementary with the corresponding nucleotide of the targeting domain within 5 nucleotides of its 3′ end.

[0379] In an embodiment, the target domain includes 1, 2, 3, or 4 nucleotides that are not complementary with the corresponding nucleotide of the targeting domain within 5 nucleotides of its 5′ end. In an embodiment, the target domain includes 1, 2, 3, or 4 nucleotides that are not complementary with the corresponding nucleotide of the targeting domain within 5 nucleotides of its 3′ end.

[0380] In an embodiment, the degree of complementarity, together with other properties of the gRNA, is sufficient to allow targeting of a Cas9 molecule to the target nucleic acid.

In some embodiments, the targeting domain comprises two consecutive nucleotides that are not complementary to the target domain (“non-complementary nucleotides”), e.g., two consecutive noncomplementary nucleotides that are within 5 nucleotides of the 5′ end of the targeting domain, within 5 nucleotides of the 3′ end of the targeting domain, or more than 5 nucleotides away from one or both ends of the targeting domain.

[0381] In an embodiment, no two consecutive nucleotides within 5 nucleotides of the 5′ end of the targeting domain, within 5 nucleotides of the 3′ end of the targeting domain, or within a region that is more than 5 nucleotides away from one or both ends of the targeting domain, are not complementary to the targeting domain.

[0382] In an embodiment, there are no noncomplementary nucleotides within 5 nucleotides of the 5′ end of the targeting domain, within 5 nucleotides of the 3′ end of the targeting domain, or within a region that is more than 5 nucleotides away from one or both ends of the targeting domain.

[0383] In an embodiment, the targeting domain nucleotides do not comprise modifications, e.g., modifications of the type provided in Section VIII. However, in an embodiment, the targeting domain comprises one or more modifications, e.g., modifications that it render it less susceptible to degradation or more bio-compatible, e.g., less immunogenic. By way of example, the backbone of the targeting domain can be modified with a phosphorothioate, or other modification(s) from Section VIII. In an embodiment, a nucleotide of the targeting domain can comprise a 2′ modification, e.g., a 2-acetylation, e.g., a 2′ methylation, or other modification(s) from Section VIII.

[0384] In some embodiments, the targeting domain includes 1, 2, 3, 4, 5, 6, 7 or 8 or more modifications. In an embodiment, the targeting domain includes 1, 2, 3, or 4 modifications within 5 nucleotides of its 5′ end. In an embodiment, the targeting domain comprises as many as 1, 2, 3, or 4 modifications within 5 nucleotides of its 3′ end.

[0385] In some embodiments, the targeting domain comprises modifications at two consecutive nucleotides, e.g., two consecutive nucleotides that are within 5 nucleotides of the 5′ end of the targeting domain, within 5 nucleotides of the 3′ end of the targeting domain, or more than 5 nucleotides away from one or both ends of the targeting domain.

[0386] In an embodiment, no two consecutive nucleotides are modified within 5 nucleotides of the 5′ end of the targeting domain, within 5 nucleotides of the 3′ end of the targeting domain, or within a region that is more than 5 nucleotides away from one or both ends of the targeting domain. In an embodiment, no nucleotide is modified within 5 nucleotides of the 5′ end of the targeting domain, within 5 nucleotides of the 3′ end of the targeting domain, or within a region that is more than 5 nucleotides away from one or both ends of the targeting domain.

[0387] Modifications in the targeting domain can be selected to not interfere with targeting efficacy, which can be evaluated by testing a candidate modification in the system described in Section IV. gRNAs having a candidate targeting domain having a selected length, sequence, degree of complementarity, or degree of modification, can be evaluated in a system in Section IV. The candidate targeting domain can be placed, either alone, or with one or more other candidate changes in a gRNA molecule/Cas9 molecule system known to be functional with a selected target and evaluated.

[0388] In an embodiment, all of the modified nucleotides are complementary to and capable of hybridizing to corresponding nucleotides present in the target domain. In another embodiment, 1, 2, 3, 4, 5, 6, 7 or 8 or more modified nucleotides are not complementary to or capable of hybridizing to corresponding nucleotides present in the target domain.

[0389] In an embodiment, the targeting domain comprises, preferably in the 5′→3′ direction: a secondary domain and a core domain. These domains are discussed in more detail below.

[0390] The Core Domain and Secondary Domain of the Targeting Domain

[0391] The “core domain” of the targeting domain is complementary to the “core domain target” on the target nucleic acid. In an embodiment, the core domain comprises about 8 to about 13 nucleotides from the 3′ end of the targeting domain (e.g., the most 3′ 8 to 13 nucleotides of the targeting domain).

[0392] In an embodiment, the core domain and targeting domain, are independently, 6+/−2, 7+/−2, 8+/−2, 9+/−2, 10+/−2, 11+/−2, 12+/−2, 13+/−2, 14+/−2, 15+/−2, or 16+-2, 17+/−2, or 18+/−2, nucleotides in length.

[0393] In an embodiment, the core domain and targeting domain, are independently 10+/−2 nucleotides in length.

[0394] In an embodiment, the core domain and targeting domain, are independently, 10+/−4 nucleotides in length.

[0395] In an embodiment, the core domain and targeting domain are independently 6, 7, 8, 9, 10, 11, 12, 13, 14, 15, 16, 17, or 18, nucleotides in length.

[0396] In an embodiment, the core domain and targeting domain are independently 3 to 20, 4 to 20, 5 to 20, 6 to 20, 7 to 20, 8 to 20, 9 to 20 10 to 20 or 15 to 20 nucleotides in length.

[0397] In an embodiment, the core domain and targeting domain are independently 3 to 15, e.g., 6 to 15, 7 to 14, 7 to 13, 6 to 12, 7 to 12, 7 to 11, 7 to 10, 8 to 14, 8 to 13, 8 to 12, 8 to 11, 8 to 10 or 8 to 9 nucleotides in length.

[0398] The “core domain” is complementary with the “core domain target” of the target nucleic acid. Typically the core domain has exact complementarity with the core domain target. In some embodiments, the core domain can have 1, 2, 3, 4 or 5 nucleotides that are not complementary with the corresponding nucleotide of the core domain. In an embodiment, the degree of complementarity, together with other properties of the gRNA, is sufficient to allow targeting of a Cas9 molecule to the target nucleic acid.

[0399] The “secondary domain” of the targeting domain of the gRNA is complementary to the “secondary domain target” of the target nucleic acid.

[0400] In an embodiment, the secondary domain is positioned 5′ to the core domain.

[0401] In an embodiment, the secondary domain is absent or optional.

[0402] In an embodiment, if the targeting domain is 26 nucleotides in length and the core domain (counted from the 3′ end of the targeting domain) is 8 to 13 nucleotides in length, the secondary domain is 12 to 17 nucleotides in length.

[0403] In an embodiment, if the targeting domain is 25 nucleotides in length and the core domain (counted from the 3′ end of the targeting domain) is 8 to 13 nucleotides in length, the secondary domain is 12 to 17 nucleotides in length.

[0404] In an embodiment, if the targeting domain is 24 nucleotides in length and the core domain (counted from the 3′ end of the targeting domain) is 8 to 13 nucleotides in length, the secondary domain is 11 to 16 nucleotides in length.

[0405] In an embodiment, if the targeting domain is 23 nucleotides in length and the core domain (counted from the 3′ end of the targeting domain) is 8 to 13 nucleotides in length, the secondary domain is 10 to 15 nucleotides in length.

[0406] In an embodiment, if the targeting domain is 22 nucleotides in length and the core domain (counted from the 3′ end of the targeting domain) is 8 to 13 nucleotides in length, the secondary domain is 9 to 14 nucleotides in length.

[0407] In an embodiment, if the targeting domain is 21 nucleotides in length and the core domain (counted from the 3′ end of the targeting domain) is 8 to 13 nucleotides in length, the secondary domain is 8 to 13 nucleotides in length.

[0408] In an embodiment, if the targeting domain is 20 nucleotides in length and the core domain (counted from the 3′ end of the targeting domain) is 8 to 13 nucleotides in length, the secondary domain is 7 to 12 nucleotides in length.

[0409] In an embodiment, if the targeting domain is 19 nucleotides in length and the core domain (counted from the 3′ end of the targeting domain) is 8 to 13 nucleotides in length, the secondary domain is 6 to 11 nucleotides in length.

[0410] In an embodiment, if the targeting domain is 18 nucleotides in length and the core domain (counted from the 3′ end of the targeting domain) is 8 to 13 nucleotides in length, the secondary domain is 5 to 10 nucleotides in length.

[0411] In an embodiment, if the targeting domain is 17 nucleotides in length and the core domain (counted from the 3′ end of the targeting domain) is 8 to 13 nucleotides in length, the secondary domain is 4 to 9 nucleotides in length.

[0412] In an embodiment, if the targeting domain is 16 nucleotides in length and the core domain (counted from the 3′ end of the targeting domain) is 8 to 13 nucleotides in length, the secondary domain is 3 to 8 nucleotides in length.

[0413] In an embodiment, the secondary domain is 0, 1, 2, 3, 4, 5, 6, 7, 8, 9, 10, 11, 12, 13, 14 or 15 nucleotides in length.

[0414] The secondary domain is complementary with the secondary domain target. Typically the secondary domain has exact complementarity with the secondary domain target. In some embodiments the secondary domain can have 1, 2, 3, 4 or 5 nucleotides that are not complementary with the corresponding nucleotide of the secondary domain. In an embodiment, the degree of complementarity, together with other properties of the gRNA, is sufficient to allow targeting of a Cas9 molecule to the target nucleic acid.

[0415] In an embodiment, the core domain nucleotides do not comprise modifications, e.g., modifications of the type provided in Section VIII. However, in an embodiment, the core domain comprises one or more modifications, e.g., modifications that it render it less susceptible to degradation or more bio-compatible, e.g., less immunogenic. By way of example, the backbone of the core domain can be modified with a phosphorothioate, or other modification(s) from Section VIII. In an embodiment a nucleotide of the core domain can comprise a 2′ modification, e.g., a 2-acetylation, e.g., a 2′ methylation, or other modification(s) from Section VIII. Typically, a core domain will contain no more than 1, 2, or 3 modifications.

[0416] Modifications in the core domain can be selected to not interfere with targeting efficacy, which can be evaluated by testing a candidate modification in the system described in Section IV. gRNAs having a candidate core domain having a selected length, sequence, degree of complementarity, or degree of modification, can be evaluated in the system described at Section IV. The candidate core domain can be placed, either alone, or with one or more other candidate changes in a gRNA molecule/Cas9 molecule system known to be functional with a selected target and evaluated.

[0417] In an embodiment, the secondary domain nucleotides do not comprise modifications, e.g., modifications of the type provided in Section VIII. However, in an embodiment, the secondary domain comprises one or more modifications, e.g., modifications that render it less susceptible to degradation or more bio-compatible, e.g., less immunogenic. By way of example, the backbone of the secondary domain can be modified with a phosphorothioate, or other modification(s) from Section VIII. In an embodiment a nucleotide of the secondary domain can comprise a 2′ modification, e.g., a 2-acetylation, e.g., a 2′ methylation, or other modification(s) from Section VIII. Typically, a secondary domain will contain no more than 1, 2, or 3 modifications.

[0418] Modifications in the secondary domain can be selected to not interfere with targeting efficacy, which can be evaluated by testing a candidate modification in the system described in Section IV. gRNAs having a candidate secondary domain having a selected length, sequence, degree of complementarity, or degree of modification, can be evaluated in the system described at Section IV. The candidate secondary domain can be placed, either alone, or with one or more other candidate changes in a gRNA molecule/Cas9 molecule system known to be functional with a selected target and evaluated.

[0419] In an embodiment, (1) the degree of complementarity between the core domain and its target, and (2) the degree of complementarity between the secondary domain and its target, may differ. In an embodiment, (1) may be greater than (2). In an embodiment, (1) may be less than (2). In an embodiment, (1) and (2) are the same, e.g., each may be completely complementary with its target.

[0420] In an embodiment, (1) the number of modifications (e.g., modifications from Section VIII) of the nucleotides of the core domain and (2) the number of modification (e.g., modifications from Section VIII) of the nucleotides of the secondary domain, may differ. In an embodiment, (1) may be less than (2). In an embodiment, (1) may be greater than (2). In an embodiment, (1) and (2) may be the same, e.g., each may be free of modifications.

[0421] The First and Second Complementarity Domains

[0422] The first complementarity domain is complementary with the second complementarity domain.

[0423] Typically the first domain does not have exact complementarity with the second complementarity domain target. In some embodiments, the first complementarity domain can have 1, 2, 3, 4 or 5 nucleotides that are not complementary with the corresponding nucleotide of the second complementarity domain. In an embodiment, 1, 2, 3, 4, 5 or 6, e.g., 3 nucleotides, will not pair in the duplex, and, e.g., form a non-duplexed or looped-out region. In an embodiment, an unpaired, or loop-out, region, e.g., a loop-out of 3 nucleotides, is present on the second complementarity domain. In an embodiment, the unpaired region begins 1, 2, 3, 4, 5, or 6, e.g., 4, nucleotides from the 5′ end of the second complementarity domain.

[0424] In an embodiment, the degree of complementarity, together with other properties of the gRNA, is sufficient to allow targeting of a Cas9 molecule to the target nucleic acid.

[0425] In an embodiment, the first and second complementarity domains are:

[0426] independently, 6+/−2, 7+/−2, 8+/−2, 9+/−2, 10+/−2, 11+/−2, 12+/−2, 13+/−2, 14+/−2, 15+/−2, 16+/−2, 17+/−2, 18+/−2, 19+/−2, or 20+/−2, 21+/−2, 22+/−2, 23+/−2, or 24+/−2 nucleotides in length;

[0427] independently, 6, 7, 8, 9, 10, 11, 12, 13, 14, 14, 16, 17, 18, 19, 20, 21, 22, 23, 24, 25, or 26, nucleotides in length; or

[0428] independently, 5 to 24, 5 to 23, 5 to 22, 5 to 21, 5 to 20, 7 to 18, 9 to 16, or 10 to 14 nucleotides in length.

[0429] In an embodiment, the second complementarity domain is longer than the first complementarity domain, e.g., 2, 3, 4, 5, or 6, e.g., 6, nucleotides longer.

[0430] In an embodiment, the first and second complementary domains, independently, do not comprise modifications, e.g., modifications of the type provided in Section VIII.

[0431] In an embodiment, the first and second complementary domains, independently, comprise one or more modifications, e.g., modifications that the render the domain less susceptible to degradation or more bio-compatible, e.g., less immunogenic. By way of example, the backbone of the domain can be modified with a phosphorothioate, or other modification(s) from Section VIII. In an embodiment, a nucleotide of the domain can comprise a 2′ modification, e.g., a 2-acetylation, e.g., a 2′ methylation, or other modification(s) from Section VIII.

[0432] In an embodiment, the first and second complementary domains, independently, include 1, 2, 3, 4, 5, 6, 7 or 8 or more modifications. In an embodiment, the first and second complementary domains, independently, include 1, 2, 3, or 4 modifications within 5 nucleotides of its 5′ end. In an embodiment, the first and second complementary domains, independently, include as many as 1, 2, 3, or 4 modifications within 5 nucleotides of its 3′ end.

[0433] In an embodiment, the first and second complementary domains, independently, include modifications at two consecutive nucleotides, e.g., two consecutive nucleotides that are within 5 nucleotides of the 5′ end of the domain, within 5 nucleotides of the 3′ end of the domain, or more than 5 nucleotides away from one or both ends of the domain. In an embodiment, the first and second complementary domains, independently, include no two consecutive nucleotides that are modified, within 5 nucleotides of the 5′ end of the domain, within 5 nucleotides of the 3′ end of the domain, or within a region that is more than 5 nucleotides away from one or both ends of the domain. In an embodiment, the first and second complementary domains, independently, include no nucleotide that is modified within 5 nucleotides of the 5′ end of the domain, within 5 nucleotides of the 3′ end of the domain, or within a region that is more than 5 nucleotides away from one or both ends of the domain.

[0434] Modifications in a complementarity domain can be selected to not interfere with targeting efficacy, which can be evaluated by testing a candidate modification in the system described in Section IV. gRNAs having a candidate complementarity domain having a selected length, sequence, degree of complementarity, or degree of modification, can be evaluated in the system described in Section IV. The candidate complementarity domain can be placed, either alone, or with one or more other candidate changes in a gRNA molecule/Cas9 molecule system known to be functional with a selected target and evaluated.

[0435] In an embodiment, the first complementarity domain has at least 60, 70, 80, 85%, 90% or 95% homology with, or differs by no more than 1, 2, 3, 4, 5, or 6 nucleotides from, a reference first complementarity domain, e.g., a naturally occurring, e.g., an S. pyogenes, S. aureus or S. thermophilus, first complementarity domain, or a first complementarity domain described herein, e.g., from FIGS. 1A-1G.

[0436] In an embodiment, the second complementarity domain has at least 60, 70, 80, 85%, 90%, or 95% homology with, or differs by no more than 1, 2, 3, 4, 5, or 6 nucleotides from, a reference second complementarity domain, e.g., a naturally occurring, e.g., an S. pyogenes, S. aureus or S. thermophilus, second complementarity domain, or a second complementarity domain described herein, e.g., from FIGS. 1A-1G.

[0437] The duplexed region formed by first and second complementarity domains is typically 6, 7, 8, 9, 10, 11, 12, 13, 14, 15, 16, 17, 18, 19, 20, 21 or 22 base pairs in length (excluding any looped out or unpaired nucleotides).

[0438] In some embodiments, the first and second complementarity domains, when duplexed, comprise 11 paired nucleotides, for example, in the gRNA sequence (one paired strand underlined, one bolded):

(SEQ ID NO: 5)

NNNNNNNNNNNNNNNNNNNNGUUUUAGAGCUAGAAAUAGCAAGUUAAAAU
AAGGCUAGUCCGUUAUCAACUUGAAAAAGUGGCACCGAGUCGGUGC.

In some embodiments, the first and second complementarity domains, when duplexed, comprise 15 paired nucleotides, for example in the gRNA sequence (one paired strand underlined, one bolded):

(SEQ ID NO: 27)

NNNNNNNNNNNNNNNNNNNNGUUUUAGAGCUAUGCUGAAAAGCAUAGCAA
GUUAAAAUAAGGCUAGUCCGUUAUCAACUUGAAAAAGUGGCACCGAGUCG
GUGC.

In some embodiments the first and second complementarity domains, when duplexed, comprise 16 paired nucleotides, for example in the gRNA sequence (one paired strand underlined, one bolded):

(SEQ ID NO: 28)

NNNNNNNNNNNNNNNNNNNNGUUUUAGAGCUAUGCUGGAAACAGCAUAGC
AAGUUAAAAUAAGGCUAGUCCGUUAUCAACUUGAAAAAGUGGCACCGAG
UCGGUGC.

In some embodiments the first and second complementarity domains, when duplexed, comprise 21 paired nucleotides, for example in the gRNA sequence (one paired strand underlined, one bolded):

(SEQ ID NO: 29)

NNNNNNNNNNNNNNNNNNNNGUUUUAGAGCUAUGCUGUUUUGGAAACAAA
ACAGCAUAGCAAGUUAAAAUAAGGCUAGUCCGUUAUCAACUUGAAAAAGU
GGCACCGAGUCGGUGC.

In some embodiments, nucleotides are exchanged to remove poly-U tracts, for example in the gRNA sequences (exchanged nucleotides underlined):

(SEQ ID NO: 30)

NNNNNNNNNNNNNNNNNNNNGUAUUAGAGCUAGAAAUAGCAAGUUAAUAU
AAGGCUAGUCCGUUAUCAACUUGAAAAAGUGGCACCGAGUCGGUGC;

(SEQ ID NO: 31)

NNNNNNNNNNNNNNNNNNNNGUUUAAGAGCUAGAAAUAGCAAGUUUAAAU
AAGGCUAGUCCGUUAUCAACUUGAAAAAGUGGCACCGAGUCGGUGC;
or

(SEQ ID NO: 32)

NNNNNNNNNNNNNNNNNNNNGUAUUAGAGCUAUGCUGUAUUGGAAACAAU
ACAGCAUAGCAAGUUAAUAUAAGGCUAGUCCGUUAUCAACUUGAAAAAGU
GGCACCGAGUCGGUGC.

### The 5′ Extension Domain

[0439] In an embodiment, a modular gRNA can comprise additional sequence, 5′ to the second complementarity domain. In an embodiment, the 5′ extension domain is 2 to 10, 2 to 9, 2 to 8, 2 to 7, 2 to 6, 2 to 5, or 2 to 4 nucleotides in length. In an embodiment, the 5′ extension domain is 2, 3, 4, 5, 6, 7, 8, 9, or 10 or more nucleotides in length.

[0440] In an embodiment, the 5′ extension domain nucleotides do not comprise modifications, e.g., modifications of the type provided in Section VIII. However, in an embodiment, the 5′ extension domain comprises one or more modifications, e.g., modifications that it render it less susceptible to degradation or more bio-compatible, e.g., less immunogenic. By way of example, the backbone of the 5′ extension domain can be modified with a phosphorothioate, or other modification(s) from Section VIII. In an embodiment, a nucleotide of the 5′ extension domain can comprise a 2′ modification, e.g., a 2-acetylation, e.g., a 2′ methylation, or other modification(s) from Section VIII.

[0441] In some embodiments, the 5′ extension domain can comprise as many as 1, 2, 3, 4, 5, 6, 7 or 8 modifications. In an embodiment, the 5′ extension domain comprises as many as 1, 2, 3, or 4 modifications within 5 nucleotides of its 5′ end, e.g., in a modular gRNA molecule. In an embodiment, the 5′ extension domain comprises as many as 1, 2, 3, or 4 modifications within 5 nucleotides of its 3′ end, e.g., in a modular gRNA molecule.

[0442] In some embodiments, the 5′ extension domain comprises modifications at two consecutive nucleotides, e.g., two consecutive nucleotides that are within 5 nucleotides of the 5′ end of the 5′ extension domain, within 5 nucleotides of the 3′ end of the 5′ extension domain, or more than 5 nucleotides away from one or both ends of the 5′ extension domain. In an embodiment, no two consecutive nucleotides are modified within 5 nucleotides of the 5′ end of the 5′ extension domain, within 5 nucleotides of the 3′ end of the 5′ extension domain, or within a region that is more than 5 nucleotides away from one or both ends of the 5′ extension domain. In an embodiment, no nucleotide is modified within 5 nucleotides of the 5′ end of the 5′ extension domain, within 5 nucleotides of the 3′ end of the 5′ extension domain, or within a region that is more than 5 nucleotides away from one or both ends of the 5′ extension domain.

[0443] Modifications in the 5′ extension domain can be selected to not interfere with gRNA molecule efficacy, which can be evaluated by testing a candidate modification in the system described in Section IV. gRNAs having a candidate 5′ extension domain having a selected length, sequence, degree of complementarity, or degree of modification, can be evaluated in the system described at Section IV. The candidate 5′ extension domain can be placed, either alone, or with one or more other candidate changes in a gRNA molecule/Cas9 molecule system known to be functional with a selected target and evaluated.

[0444] In an embodiment, the 5′ extension domain has at least 60, 70, 80, 85, 90 or 95% homology with, or differs by no more than 1, 2, 3, 4, 5, or 6 nucleotides from, a reference 5′ extension domain, e.g., a naturally occurring, e.g., an S. pyogenes, S. aureus or S. thermophilus, 5′ extension domain, or a 5′ extension domain described herein, e.g., from FIGS. 1A-1G.

### The Linking Domain

[0445] In a unimolecular gRNA molecule the linking domain is disposed between the first and second complementarity domains. In a modular gRNA molecule, the two molecules are associated with one another by the complementarity domains.

[0446] In an embodiment, the linking domain is 10+/−5, 20+/−5, 30+/−5, 40+/−5, 50+/−5, 60+/−5, 70+/−5, 80+/−5, 90+/−5, or 100+/−5 nucleotides, in length.

[0447] In an embodiment, the linking domain is 20+/−10, 30+/−10, 40+/−10, 50+/−10, 60+/−10, 70+/−10, 80+/−10, 90+/−10, or 100+/−10 nucleotides, in length.

[0448] In an embodiment, the linking domain is 10 to 100, 10 to 90, 10 to 80, 10 to 70, 10 to 60, 10 to 50, 10 to 40, 10 to 30, 10 to 20 or 10 to 15 nucleotides in length. In other embodiments, the linking domain is 20 to 100, 20 to 90, 20 to 80, 20 to 70, 20 to 60, 20 to 50, 20 to 40, 20 to 30, or 20 to 25 nucleotides in length.

[0449] In an embodiment, the linking domain is 1, 2, 3, 4, 5, 6, 7, 8, 9, 10, 11, 12, 13, 14, 15, 16 17, 18, 19, or 20 nucleotides in length.

[0450] In and embodiment, the linking domain is a covalent bond.

[0451] In an embodiment, the linking domain comprises a duplexed region, typically adjacent to or within 1, 2, or 3 nucleotides of the 3′ end of the first complementarity domain and/or the 5-end of the second complementarity domain. In an embodiment, the duplexed region can be 20+/−10 base pairs in length. In an embodiment, the duplexed region can be 10+/−5, 15+/−5, 20+/−5, or 30+/−5 base pairs in length. In an embodiment, the duplexed region can be 1, 2, 3, 4, 5, 6, 7, 8, 9, 10, 11, 12, 13, 14, or 15 base pairs in length.

[0452] Typically the sequences forming the duplexed region have exact complementarity with one another, though in some embodiments as many as 1, 2, 3, 4, 5, 6, 7 or 8 nucleotides are not complementary with the corresponding nucleotides.

[0453] In an embodiment, the linking domain nucleotides do not comprise modifications, e.g., modifications of the type provided in Section VIII. However, in an embodiment, the linking domain comprises one or more modifications, e.g., modifications that it render it less susceptible to degradation or more bio-compatible, e.g., less immunogenic. By way of example, the backbone of the linking domain can be modified with a phosphorothioate, or other modification(s) from Section VIII. In an embodiment a nucleotide of the linking domain can comprise a 2′ modification, e.g., a 2-acetylation, e.g., a 2′ methylation, or other modification(s) from Section VIII.

In some embodiments, the linking domain can comprise as many as 1, 2, 3, 4, 5, 6, 7 or 8 modifications.

[0454] Modifications in a linking domain can be selected to not interfere with targeting efficacy, which can be evaluated by testing a candidate modification in the system described in Section IV. gRNAs having a candidate linking domain having a selected length, sequence, degree of complementarity, or degree of modification, can be evaluated a system described in Section IV. A candidate linking domain can be placed, either alone, or with one or more other candidate changes in a gRNA molecule/Cas9 molecule system known to be functional with a selected target and evaluated.

[0455] In an embodiment, the linking domain has at least 60, 70, 80, 85, 90 or 95% homology with, or differs by no more than 1, 2, 3, 4, 5, or 6 nucleotides from, a reference linking domain, e.g., a linking domain described herein, e.g., from FIGS. 1A-1G.

[0456] The Proximal Domain

[0457] In an embodiment, the proximal domain is 6+/−2, 7+/−2, 8+/−2, 9+/−2, 10+/−2, 11+/−2, 12+/−2, 13+/−2, 14+/−2, 14+/−2, 16+/−2, 17+/−2, 18+/−2, 19+/−2, or 20+/−2 nucleotides in length.

[0458] In an embodiment, the proximal domain is 6, 7, 8, 9, 10, 11, 12, 13, 14, 15, 16, 17, 18, 19, 20, 21, 22, 23, 24, 25 or 26 nucleotides in length.

[0459] In an embodiment, the proximal domain is 5 to 20, 7, to 18, 9 to 16, or 10 to 14 nucleotides in length.

[0460] In an embodiment, the proximal domain nucleotides do not comprise modifications, e.g., modifications of the type provided in Section VIII. However, in an embodiment, the proximal domain comprises one or more modifications, e.g., modifications that it render it less susceptible to degradation or more bio-compatible, e.g., less immunogenic. By way of example, the backbone of the proximal domain can be modified with a phosphorothioate, or other modification(s) from Section VIII. In an embodiment a nucleotide of the proximal domain can comprise a 2′ modification, e.g., a 2-acetylation, e.g., a 2′ methylation, or other modification(s) from Section VIII.

[0461] In some embodiments, the proximal domain can comprise as many as 1, 2, 3, 4, 5, 6, 7 or 8 modifications. In an embodiment, the proximal domain comprises as many as 1, 2, 3, or 4 modifications within 5 nucleotides of its 5′ end, e.g., in a modular gRNA molecule. In an embodiment, the target domain comprises as many as 1, 2, 3, or 4 modifications within 5 nucleotides of its 3′ end, e.g., in a modular gRNA molecule.

[0462] In some embodiments, the proximal domain comprises modifications at two consecutive nucleotides, e.g., two consecutive nucleotides that are within 5 nucleotides of the 5′ end of the proximal domain, within 5 nucleotides of the 3′ end of the proximal domain, or more than 5 nucleotides away from one or both ends of the proximal domain. In an embodiment, no two consecutive nucleotides are modified within 5 nucleotides of the 5′ end of the proximal domain, within 5 nucleotides of the 3′ end of the proximal domain, or within a region that is more than 5 nucleotides away from one or both ends of the proximal domain. In an embodiment, no nucleotide is modified within 5 nucleotides of the 5′ end of the proximal domain, within 5 nucleotides of the 3′ end of the proximal domain, or within a region that is more than 5 nucleotides away from one or both ends of the proximal domain.

[0463] Modifications in the proximal domain can be selected so as to not interfere with gRNA molecule efficacy, which can be evaluated by testing a candidate modification in the system described in Section IV. gRNAs having a candidate proximal domain having a selected length, sequence, degree of complementarity, or degree of modification, can be evaluated in the system described at Section IV. The candidate proximal domain can be placed, either alone, or with one or more other candidate changes in a gRNA molecule/Cas9 molecule system known to be functional with a selected target and evaluated.

[0464] In an embodiment, the proximal domain has at least 60, 70, 80, 85 90 or 95% homology with, or differs by no more than 1, 2, 3, 4, 5, or 6 nucleotides from, a reference proximal domain, e.g., a naturally occurring, e.g., an S. pyogenes, S. aureus or S. thermophilus, proximal domain, or a proximal domain described herein, e.g., from FIGS. 1A-1G.

[0465] The Tail Domain

[0466] In an embodiment, the tail domain is 10+/−5, 20+/−5, 30+/−5, 40+/−5, 50+/−5, 60+/−5, 70+/−5, 80+/−5, 90+/−5, or 100+/−5 nucleotides, in length.

[0467] In an embodiment, the tail domain is 20+/−5 nucleotides in length.

[0468] In an embodiment, the tail domain is 20+/−10, 30+/−10, 40+/−10, 50+/−10, 60+/−10, 70+/−10, 80+/−10, 90+/−10, or 100+/−10 nucleotides, in length.

[0469] In an embodiment, the tail domain is 25+/−10 nucleotides in length.

[0470] In an embodiment, the tail domain is 10 to 100, 10 to 90, 10 to 80, 10 to 70, 10 to 60, 10 to 50, 10 to 40, 10 to 30, 10 to 20 or 10 to 15 nucleotides in length.

[0471] In other embodiments, the tail domain is 20 to 100, 20 to 90, 20 to 80, 20 to 70, 20 to 60, 20 to 50, 20 to 40, 20 to 30, or 20 to 25 nucleotides in length.

[0472] In an embodiment, the tail domain is 1 to 20, 1 to 15, 1 to 10, or 1 to 5 nucleotides in length.

[0473] In an embodiment, the tail domain nucleotides do not comprise modifications, e.g., modifications of the type provided in Section VIII. However, in an embodiment, the tail domain comprises one or more modifications, e.g., modifications that it render it less susceptible to degradation or more bio-compatible, e.g., less immunogenic. By way of example, the backbone of the tail domain can be modified with a phosphorothioate, or other modification(s) from Section VIII. In an embodiment a nucleotide of the tail domain can comprise a 2′ modification, e.g., a 2-acetylation, e.g., a 2′ methylation, or other modification(s) from Section VIII.

[0474] In some embodiments, the tail domain can have as many as 1, 2, 3, 4, 5, 6, 7 or 8 modifications. In an embodiment, the target domain comprises as many as 1, 2, 3, or 4 modifications within 5 nucleotides of its 5′ end. In an embodiment, the target domain comprises as many as 1, 2, 3, or 4 modifications within 5 nucleotides of its 3′ end.

[0475] In an embodiment, the tail domain comprises a tail duplex domain, which can form a tail duplexed region. In an embodiment, the tail duplexed region can be 3, 4, 5, 6, 7, 8, 9, 10, 11, or 12 base pairs in length. In an embodiment, a further single stranded domain, exists 3′ to the tail duplexed domain. In an embodiment, this domain is 3, 4, 5, 6, 7, 8, 9, or 10 nucleotides in length. In an embodiment it is 4 to 6 nucleotides in length.

[0476] In an embodiment, the tail domain has at least 60, 70, 80, or 90% homology with, or differs by no more than 1, 2, 3, 4, 5, or 6 nucleotides from, a reference tail domain, e.g., a naturally occurring, e.g., an S. pyogenes, S. aureus or S. thermophilus, tail domain, or a tail domain described herein, e.g., from FIGS. 1A-1G.

[0477] In an embodiment, the proximal and tail domain, taken together comprise the following sequences:

(SEQ ID NO: 33)

AAGGCUAGUCCGUUAUCAACUUGAAAAAGUGGCACCGAGUCGGUGCU,
or

(SEQ ID NO: 34)

AAGGCUAGUCCGUUAUCAACUUGAAAAAGUGGCACCGAGUCGGUGGUGC,
or

(SEQ ID NO: 35)

AAGGCUAGUCCGUUAUCAACUUGAAAAAGUGGCACCGAGUCGGUGCGGAU
C,
or

(SEQ ID NO: 36)

AAGGCUAGUCCGUUAUCAACUUGAAAAAGUG,
or

(SEQ ID NO: 37)

AAGGCUAGUCCGUUAUCA,
or

(SEQ ID NO: 38)

AAGGCUAGUCCG.

[0478] In an embodiment, the tail domain comprises the 3′ sequence UUUUUU, e.g., if a U6 promoter is used for transcription.

[0479] In an embodiment, the tail domain comprises the 3′ sequence UUUU, e.g., if an H1 promoter is used for transcription.

[0480] In an embodiment, tail domain comprises variable numbers of 3′ Us depending, e.g., on the termination signal of the pol-III promoter used.

[0481] In an embodiment, the tail domain comprises variable 3′ sequence derived from the DNA template if a T7 promoter is used.

[0482] In an embodiment, the tail domain comprises variable 3′ sequence derived from the DNA template, e.g., if in vitro transcription is used to generate the RNA molecule.

[0483] In an embodiment, the tail domain comprises variable 3′ sequence derived from the DNA template, e.g., if a pol-II promoter is used to drive transcription.

[0484] Modifications in the tail domain can be selected to not interfere with targeting efficacy, which can be evaluated by testing a candidate modification in the system described in Section IV. gRNAs having a candidate tail domain having a selected length, sequence, degree of complementarity, or degree of modification, can be evaluated in the system described in Section IV. The candidate tail domain can be placed, either alone, or with one or more other candidate changes in a gRNA molecule/Cas9 molecule system known to be functional with a selected target and evaluated.

[0485] In an embodiment, the tail domain comprises modifications at two consecutive nucleotides, e.g., two consecutive nucleotides that are within 5 nucleotides of the 5′ end of the tail domain, within 5 nucleotides of the 3′ end of the tail domain, or more than 5 nucleotides away from one or both ends of the tail domain. In an embodiment, no two consecutive nucleotides are modified within 5 nucleotides of the 5′ end of the tail domain, within 5 nucleotides of the 3′ end of the tail domain, or within a region that is more than 5 nucleotides away from one or both ends of the tail domain. In an embodiment, no nucleotide is modified within 5 nucleotides of the 5′ end of the tail domain, within 5 nucleotides of the 3′ end of the tail domain, or within a region that is more than 5 nucleotides away from one or both ends of the tail domain.

[0486] In an embodiment, a gRNA has the following structure:

[0487] 5′ [targeting domain]-[first complementarity domain]-[linking domain]-[second complementarity domain]-[proximal domain]-[tail domain]-3′

[0488] wherein, the targeting domain comprises a core domain and optionally a secondary domain, and is 10 to 50 nucleotides in length;

[0489] the first complementarity domain is 5 to 25 nucleotides in length and, in an embodiment, has at least 50, 60, 70, 80, 85, 90 or 95% homology with a reference first complementarity domain disclosed herein;

[0490] the linking domain is 1 to 5 nucleotides in length;

[0491] the second complementarity domain is 5 to 27 nucleotides in length and, in an embodiment has at least 50, 60, 70, 80, 85, 90 or 95% homology with a reference second complementarity domain disclosed herein;

the proximal domain is 5 to 20 nucleotides in length and, in an embodiment, has at least 50, 60, 70, 80, 85, 90 or 95% homology with a reference proximal domain disclosed herein; and

[0492] the tail domain is absent or a nucleotide sequence is 1 to 50 nucleotides in length and, in an embodiment, has at least 50, 60, 70, 80, 85, 90 or 95% homology with a reference tail domain disclosed herein.

[0493] Exemplary Chimeric gRNAs

[0494] In an embodiment, a unimolecular, or chimeric, gRNA comprises, preferably from 5′ to 3′:

[0495] a targeting domain (which is complementary to a target nucleic acid);

[0496] a first complementarity domain, e.g., comprising 15, 16, 17, 18, 19, 20, 21, 22, 23, 24, 25, or 26 nucleotides;

[0497] a linking domain;

[0498] a second complementarity domain (which is complementary to the first complementarity domain);

[0499] a proximal domain; and

[0500] a tail domain, wherein,

[0501] (a) the proximal and tail domain, when taken together, comprise

[0502] at least 15, 18, 20, 25, 30, 31, 35, 40, 45, 49, 50, or 53 nucleotides;

[0503] (b) there are at least 15, 18, 20, 25, 30, 31, 35, 40, 45, 49, 50, or 53 nucleotides 3′ to the last nucleotide of the second complementarity domain; or

[0504] (c) there are at least 16, 19, 21, 26, 31, 32, 36, 41, 46, 50, 51, or 54 nucleotides 3′ to the last nucleotide of the second complementarity domain that is complementary to its corresponding nucleotide of the first complementarity domain.

[0505] In an embodiment, the sequence from (a), (b), or (c), has at least 60, 75, 80, 85, 90, 95, or 99% homology with the corresponding sequence of a naturally occurring gRNA, or with a gRNA described herein.

[0506] In an embodiment, the proximal and tail domain, when taken together, comprise at least 15, 18, 20, 25, 30, 31, 35, 40, 45, 49, 50, or 53 nucleotides.

[0507] In an embodiment, there are at least 15, 18, 20, 25, 30, 31, 35, 40, 45, 49, 50, or 53 nucleotides 3′ to the last nucleotide of the second complementarity domain.

[0508] In an embodiment, there are at least 16, 19, 21, 26, 31, 32, 36, 41, 46, 50, 51, or 54 nucleotides 3′ to the last nucleotide of the second complementarity domain that is complementary to its corresponding nucleotide of the first complementarity domain.

[0509] In an embodiment, the targeting domain comprises, has, or consists of, 16, 17, 18, 19, 20, 21, 22, 23, 24, 25 or 26 nucleotides (e.g., 16, 17, 18, 19, 20, 21, 22, 23, 24, 25 or 26 consecutive nucleotides) having complementarity with the target domain, e.g., the targeting domain is 16, 17, 18, 19, 20, 21, 22, 23, 24, 25 or 26 nucleotides in length.

[0510] In an embodiment, the targeting domain comprises, has, or consists of, 16 nucleotides (e.g., 16 consecutive nucleotides) having complementarity with the target domain, e.g., the targeting domain is 16 nucleotides in length.

[0511] In an embodiment, the targeting domain comprises, has, or consists of, 17 nucleotides (e.g., 17 consecutive nucleotides) having complementarity with the target domain, e.g., the targeting domain is 17 nucleotides in length.

[0512] In an embodiment, the targeting domain comprises, has, or consists of, 18 nucleotides (e.g., 18 consecutive nucleotides) having complementarity with the target domain, e.g., the targeting domain is 18 nucleotides in length.

[0513] In an embodiment, the targeting domain comprises, has, or consists of, 19 nucleotides (e.g., 19 consecutive nucleotides) having complementarity with the target domain, e.g., the targeting domain is 19 nucleotides in length.

[0514] In an embodiment, the targeting domain comprises, has, or consists of, 20 nucleotides (e.g., 20 consecutive nucleotides) having complementarity with the target domain, e.g., the targeting domain is 20 nucleotides in length.

[0515] In an embodiment, the targeting domain comprises, has, or consists of, 21 nucleotides (e.g., 21 consecutive nucleotides) having complementarity with the target domain, e.g., the targeting domain is 21 nucleotides in length.

[0516] In an embodiment, the targeting domain comprises, has, or consists of, 22 nucleotides (e.g., 22 consecutive nucleotides) having complementarity with the target domain, e.g., the targeting domain is 22 nucleotides in length.

[0517] In an embodiment, the targeting domain comprises, has, or consists of, 23 nucleotides (e.g., 23 consecutive nucleotides) having complementarity with the target domain, e.g., the targeting domain is 23 nucleotides in length.

[0518] In an embodiment, the targeting domain comprises, has, or consists of, 24 nucleotides (e.g., 24 consecutive nucleotides) having complementarity with the target domain, e.g., the targeting domain is 24 nucleotides in length.

[0519] In an embodiment, the targeting domain comprises, has, or consists of, 25 nucleotides (e.g., 25 consecutive nucleotides) having complementarity with the target domain, e.g., the targeting domain is 25 nucleotides in length.

[0520] In an embodiment, the targeting domain comprises, has, or consists of, 26 nucleotides (e.g., 26 consecutive nucleotides) having complementarity with the target domain, e.g., the targeting domain is 26 nucleotides in length.

[0521] In an embodiment, the targeting domain comprises, has, or consists of, 16 nucleotides (e.g., 16 consecutive nucleotides) having complementarity with the target domain, e.g., the targeting domain is 16 nucleotides in length; and the proximal and tail domain, when taken together, comprise at least 15, 18, 20, 25, 30, 31, 35, 40, 45, 49, 50, or 53 nucleotides.

[0522] In an embodiment, the targeting domain comprises, has, or consists of, 16 nucleotides (e.g., 16 consecutive nucleotides) having complementarity with the target domain, e.g., the targeting domain is 16 nucleotides in length; and there are at least 15, 18, 20, 25, 30, 31, 35, 40, 45, 49, 50, or 53 nucleotides 3′ to the last nucleotide of the second complementarity domain.

[0523] In an embodiment, the targeting domain comprises, has, or consists of, 16 nucleotides (e.g., 16 consecutive nucleotides) having complementarity with the target domain, e.g., the targeting domain is 16 nucleotides in length; and there are at least 16, 19, 21, 26, 31, 32, 36, 41, 46, 50, 51, or 54 nucleotides 3′ to the last nucleotide of the second complementarity domain that is complementary to its corresponding nucleotide of the first complementarity domain.

[0524] In an embodiment, the targeting domain comprises, has, or consists of, 17 nucleotides (e.g., 17 consecutive nucleotides) having complementarity with the target domain, e.g., the targeting domain is 17 nucleotides in length; and the proximal and tail domain, when taken together, comprise at least 15, 18, 20, 25, 30, 31, 35, 40, 45, 49, 50, or 53 nucleotides.

[0525] In an embodiment, the targeting domain comprises, has, or consists of, 17 nucleotides (e.g., 17 consecutive nucleotides) having complementarity with the target domain, e.g., the targeting domain is 17 nucleotides in length; and there are at least 15, 18, 20, 25, 30, 31, 35, 40, 45, 49, 50, or 53 nucleotides 3′ to the last nucleotide of the second complementarity domain.

[0526] In an embodiment, the targeting domain comprises, has, or consists of, 17 nucleotides (e.g., 17 consecutive nucleotides) having complementarity with the target domain, e.g., the targeting domain is 17 nucleotides in length; and there are at least 16, 19, 21, 26, 31, 32, 36, 41, 46, 50, 51, or 54 nucleotides 3′ to the last nucleotide of the second complementarity domain that is complementary to its corresponding nucleotide of the first complementarity domain.

[0527] In an embodiment, the targeting domain comprises, has, or consists of, 18 nucleotides (e.g., 18 consecutive nucleotides) having complementarity with the target domain, e.g., the targeting domain is 18 nucleotides in length; and the proximal and tail domain, when taken together, comprise at least 15, 18, 20, 25, 30, 31, 35, 40, 45, 49, 50, or 53 nucleotides.

[0528] In an embodiment, the targeting domain comprises, has, or consists of, 18 nucleotides (e.g., 18 consecutive nucleotides) having complementarity with the target domain, e.g., the targeting domain is 18 nucleotides in length; and there are at least 15, 18, 20, 25, 30, 31, 35, 40, 45, 49, 50, or 53 nucleotides 3′ to the last nucleotide of the second complementarity domain.

[0529] In an embodiment, the targeting domain comprises, has, or consists of, 18 nucleotides (e.g., 18 consecutive nucleotides) having complementarity with the target domain, e.g., the targeting domain is 18 nucleotides in length; and there are at least 16, 19, 21, 26, 31, 32, 36, 41, 46, 50, 51, or 54 nucleotides 3′ to the last nucleotide of the second complementarity domain that is complementary to its corresponding nucleotide of the first complementarity domain.

[0530] In an embodiment, the targeting domain comprises, has, or consists of, 19 nucleotides (e.g., 19 consecutive nucleotides) having complementarity with the target domain, e.g., the targeting domain is 19 nucleotides in length; and the proximal and tail domain, when taken together, comprise at least 15, 18, 20, 25, 30, 31, 35, 40, 45, 49, 50, or 53 nucleotides.

[0531] In an embodiment, the targeting domain comprises, has, or consists of, 19 nucleotides (e.g., 19 consecutive nucleotides) having complementarity with the target domain, e.g., the targeting domain is 19 nucleotides in length; and there are at least 15, 18, 20, 25, 30, 31, 35, 40, 45, 49, 50, or 53 nucleotides 3′ to the last nucleotide of the second complementarity domain.

[0532] In an embodiment, the targeting domain comprises, has, or consists of, 19 nucleotides (e.g., 19 consecutive nucleotides) having complementarity with the target domain, e.g., the targeting domain is 19 nucleotides in length; and there are at least 16, 19, 21, 26, 31, 32, 36, 41, 46, 50, 51, or 54 nucleotides 3′ to the last nucleotide of the second complementarity domain that is complementary to its corresponding nucleotide of the first complementarity domain.

[0533] In an embodiment, the targeting domain comprises, has, or consists of, 20 nucleotides (e.g., 20 consecutive nucleotides) having complementarity with the target domain, e.g., the targeting domain is 20 nucleotides in length; and the proximal and tail domain, when taken together, comprise at least 15, 18, 20, 25, 30, 31, 35, 40, 45, 49, 50, or 53 nucleotides.

[0534] In an embodiment, the targeting domain comprises, has, or consists of, 20 nucleotides (e.g., 20 consecutive nucleotides) having complementarity with the target domain, e.g., the targeting domain is 20 nucleotides in length; and there are at least 15, 18, 20, 25, 30, 31, 35, 40, 45, 49, 50, or 53 nucleotides 3′ to the last nucleotide of the second complementarity domain.

[0535] In an embodiment, the targeting domain comprises, has, or consists of, 20 nucleotides (e.g., 20 consecutive nucleotides) having complementarity with the target domain, e.g., the targeting domain is 20 nucleotides in length; and there are at least 16, 19, 21, 26, 31, 32, 36, 41, 46, 50, 51, or 54 nucleotides 3′ to the last nucleotide of the second complementarity domain that is complementary to its corresponding nucleotide of the first complementarity domain.

[0536] In an embodiment, the targeting domain comprises, has, or consists of, 21 nucleotides (e.g., 21 consecutive nucleotides) having complementarity with the target domain, e.g., the targeting domain is 21 nucleotides in length; and the proximal and tail domain, when taken together, comprise at least 15, 18, 20, 25, 30, 31, 35, 40, 45, 49, 50, or 53 nucleotides.

[0537] In an embodiment, the targeting domain comprises, has, or consists of, 21 nucleotides (e.g., 21 consecutive nucleotides) having complementarity with the target domain, e.g., the targeting domain is 21 nucleotides in length; and there are at least 15, 18, 20, 25, 30, 31, 35, 40, 45, 49, 50, or 53 nucleotides 3′ to the last nucleotide of the second complementarity domain.

[0538] In an embodiment, the targeting domain comprises, has, or consists of, 21 nucleotides (e.g., 21 consecutive nucleotides) having complementarity with the target domain, e.g., the targeting domain is 21 nucleotides in length; and there are at least 16, 19, 21, 26, 31, 32, 36, 41, 46, 50, 51, or 54 nucleotides 3′ to the last nucleotide of the second complementarity domain that is complementary to its corresponding nucleotide of the first complementarity domain.

[0539] In an embodiment, the targeting domain comprises, has, or consists of, 22 nucleotides (e.g., 22 consecutive nucleotides) having complementarity with the target domain, e.g., the targeting domain is 22 nucleotides in length; and the proximal and tail domain, when taken together, comprise at least 15, 18, 20, 25, 30, 31, 35, 40, 45, 49, 50, or 53 nucleotides.

[0540] In an embodiment, the targeting domain comprises, has, or consists of, 22 nucleotides (e.g., 22 consecutive nucleotides) having complementarity with the target domain, e.g., the targeting domain is 22 nucleotides in length; and there are at least 15, 18, 20, 25, 30, 31, 35, 40, 45, 49, 50, or 53 nucleotides 3′ to the last nucleotide of the second complementarity domain.

[0541] In an embodiment, the targeting domain comprises, has, or consists of, 22 nucleotides (e.g., 22 consecutive nucleotides) having complementarity with the target domain, e.g., the targeting domain is 22 nucleotides in length; and there are at least 16, 19, 21, 26, 31, 32, 36, 41, 46, 50, 51, or 54 nucleotides 3′ to the last nucleotide of the second complementarity domain that is complementary to its corresponding nucleotide of the first complementarity domain.

[0542] In an embodiment, the targeting domain comprises, has, or consists of, 23 nucleotides (e.g., 23 consecutive nucleotides) having complementarity with the target domain, e.g., the targeting domain is 23 nucleotides in length; and the proximal and tail domain, when taken together, comprise at least 15, 18, 20, 25, 30, 31, 35, 40, 45, 49, 50, or 53 nucleotides.

[0543] In an embodiment, the targeting domain comprises, has, or consists of, 23 nucleotides (e.g., 23 consecutive nucleotides) having complementarity with the target domain, e.g., the targeting domain is 23 nucleotides in length; and there are at least 15, 18, 20, 25, 30, 31, 35, 40, 45, 49, 50, or 53 nucleotides 3′ to the last nucleotide of the second complementarity domain.

[0544] In an embodiment, the targeting domain comprises, has, or consists of, 23 nucleotides (e.g., 23 consecutive nucleotides) having complementarity with the target domain, e.g., the targeting domain is 23 nucleotides in length; and there are at least 16, 19, 21, 26, 31, 32, 36, 41, 46, 50, 51, or 54 nucleotides 3′ to the last nucleotide of the second complementarity domain that is complementary to its corresponding nucleotide of the first complementarity domain.

[0545] In an embodiment, the targeting domain comprises, has, or consists of, 24 nucleotides (e.g., 24 consecutive nucleotides) having complementarity with the target domain, e.g., the targeting domain is 24 nucleotides in length; and the proximal and tail domain, when taken together, comprise at least 15, 18, 20, 25, 30, 31, 35, 40, 45, 49, 50, or 53 nucleotides.

[0546] In an embodiment, the targeting domain comprises, has, or consists of, 24 nucleotides (e.g., 24 consecutive nucleotides) having complementarity with the target domain, e.g., the targeting domain is 24 nucleotides in length; and there are at least 15, 18, 20, 25, 30, 31, 35, 40, 45, 49, 50, or 53 nucleotides 3′ to the last nucleotide of the second complementarity domain.

[0547] In an embodiment, the targeting domain comprises, has, or consists of, 24 nucleotides (e.g., 24 consecutive nucleotides) having complementarity with the target domain, e.g., the targeting domain is 24 nucleotides in length; and there are at least 16, 19, 21, 26, 31, 32, 36, 41, 46, 50, 51, or 54 nucleotides 3′ to the last nucleotide of the second complementarity domain that is complementary to its corresponding nucleotide of the first complementarity domain.

[0548] In an embodiment, the targeting domain comprises, has, or consists of, 25 nucleotides (e.g., 25 consecutive nucleotides) having complementarity with the target domain, e.g., the targeting domain is 25 nucleotides in length; and the proximal and tail domain, when taken together, comprise at least 15, 18, 20, 25, 30, 31, 35, 40, 45, 49, 50, or 53 nucleotides.

[0549] In an embodiment, the targeting domain comprises, has, or consists of, 25 nucleotides (e.g., 25 consecutive nucleotides) having complementarity with the target domain, e.g., the targeting domain is 25 nucleotides in length; and there are at least 15, 18, 20, 25, 30, 31, 35, 40, 45, 49, 50, or 53 nucleotides 3′ to the last nucleotide of the second complementarity domain.

[0550] In an embodiment, the targeting domain comprises, has, or consists of, 25 nucleotides (e.g., 25 consecutive nucleotides) having complementarity with the target domain, e.g., the targeting domain is 25 nucleotides in length; and there are at least 16, 19, 21, 26, 31, 32, 36, 41, 46, 50, 51, or 54 nucleotides 3′ to the last nucleotide of the second complementarity domain that is complementary to its corresponding nucleotide of the first complementarity domain.

[0551] In an embodiment, the targeting domain comprises, has, or consists of, 26 nucleotides (e.g., 26 consecutive nucleotides) having complementarity with the target domain, e.g., the targeting domain is 26 nucleotides in length; and the proximal and tail domain, when taken together, comprise at least 15, 18, 20, 25, 30, 31, 35, 40, 45, 49, 50, or 53 nucleotides.

[0552] In an embodiment, the targeting domain comprises, has, or consists of, 26 nucleotides (e.g., 26 consecutive nucleotides) having complementarity with the target domain, e.g., the targeting domain is 26 nucleotides in length; and there are at least 15, 18, 20, 25, 30, 31, 35, 40, 45, 49, 50, or 53 nucleotides 3′ to the last nucleotide of the second complementarity domain.

[0553] In an embodiment, the targeting domain comprises, has, or consists of, 26 nucleotides (e.g., 26 consecutive nucleotides) having complementarity with the target domain, e.g., the targeting domain is 26 nucleotides in length; and there are at least 16, 19, 21, 26, 31, 32, 36, 41, 46, 50, 51, or 54 nucleotides 3′ to the last nucleotide of the second complementarity domain that is complementary to its corresponding nucleotide of the first complementarity domain.

[0554] In an embodiment, the unimolecular, or chimeric, gRNA molecule (comprising a targeting domain, a first complementary domain, a linking domain, a second complementary domain, a proximal domain and, optionally, a tail domain) comprises the following sequence in which the targeting domain is depicted as 20 Ns but could be any sequence and range in length from 16 to 26 nucleotides and in which the gRNA sequence is followed by 6 Us, which serve as a termination signal for the U6 promoter, but which could be either absent or fewer in number: NNNNNNNNNNNNNNNNNNNNGUUUUAGAGCUAGAAAUAGCAAGUUAAAAUAAGG CUAGUCCGUUAUCAACUUGAAAAAGUGGCACCGAGUCGGUGCUUUUUU (SEQ ID NO: 45). In an embodiment, the unimolecular, or chimeric, gRNA molecule is a S. pyogenes gRNA molecule.

[0555] In some embodiments, the unimolecular, or chimeric, gRNA molecule (comprising a targeting domain, a first complementary domain, a linking domain, a second complementary domain, a proximal domain and, optionally, a tail domain) comprises the following sequence in which the targeting domain is depicted as 20 Ns but could be any sequence and range in length from 16 to 26 nucleotides and in which the gRNA sequence is followed by 6 Us, which serve as a termination signal for the U6 promoter, but which could be either absent or fewer in number: NNNNNNNNNNNNNNNNNNNNGUUUUAGUACUCUGGAAACAGAAUCUACUAAAAC AAGGCAAAAUGCCGUGUUUAUCUCGUCAACUUGUUGGCGAGAUUUUUU (SEQ ID NO: 40). In an embodiment, the unimolecular, or chimeric, gRNA molecule is a S. aureus gRNA molecule.

[0556] The sequences and structures of exemplary chimeric gRNAs are also shown in FIGS. 1H-1I.

Exemplary Modular gRNAs

[0557] In an embodiment, a modular gRNA comprises:
[0558] a first strand comprising, preferably from 5′ to 3′;
   [0559] a targeting domain, e.g., comprising 15, 16, 17, 18, 19, 20, 21, 22, 23, 24, 25, or 26 nucleotides;
   [0560] a first complementarity domain; and
   [0561] a second strand, comprising, preferably from 5′ to 3′:
   [0562] optionally a 5′ extension domain;
   [0563] a second complementarity domain;
   [0564] a proximal domain; and
   [0565] a tail domain,
[0566] wherein:

[0567] (a) the proximal and tail domain, when taken together, comprise

[0568] at least 15, 18, 20, 25, 30, 31, 35, 40, 45, 49, 50, or 53 nucleotides;

[0569] (b) there are at least 15, 18, 20, 25, 30, 31, 35, 40, 45, 49, 50, or 53 nucleotides 3′ to the last nucleotide of the second complementarity domain; or

[0570] (c) there are at least 16, 19, 21, 26, 31, 32, 36, 41, 46, 50, 51, or 54 nucleotides 3′ to the last nucleotide of the second complementarity domain that is complementary to its corresponding nucleotide of the first complementarity domain.

[0571] In an embodiment, the sequence from (a), (b), or (c), has at least 60, 75, 80, 85, 90, 95, or 99% homology with the corresponding sequence of a naturally occurring gRNA, or with a gRNA described herein.

[0572] In an embodiment, the proximal and tail domain, when taken together, comprise at least 15, 18, 20, 25, 30, 31, 35, 40, 45, 49, 50, or 53 nucleotides.

[0573] In an embodiment, there are at least 15, 18, 20, 25, 30, 31, 35, 40, 45, 49, 50, or 53 nucleotides 3′ to the last nucleotide of the second complementarity domain.

[0574] In an embodiment, there are at least 16, 19, 21, 26, 31, 32, 36, 41, 46, 50, 51, or 54 nucleotides 3′ to the last nucleotide of the second complementarity domain that is complementary to its corresponding nucleotide of the first complementarity domain.

[0575] In an embodiment, the targeting domain comprises, has, or consists of, 16, 17, 18, 19, 20, 21, 22, 23, 24, 25 or 26 nucleotides (e.g., 16, 17, 18, 19, 20, 21, 22, 23, 24, 25 or 26 consecutive nucleotides) having complementarity with the target domain, e.g., the targeting domain is 16, 17, 18, 19, 20, 21, 22, 23, 24, 25 or 26 nucleotides in length.

[0576] In an embodiment, the targeting domain comprises, has, or consists of, 16 nucleotides (e.g., 16 consecutive nucleotides) having complementarity with the target domain, e.g., the targeting domain is 16 nucleotides in length.

[0577] In an embodiment, the targeting domain comprises, has, or consists of, 17 nucleotides (e.g., 17 consecutive nucleotides) having complementarity with the target domain, e.g., the targeting domain is 17 nucleotides in length.

[0578] In an embodiment, the targeting domain comprises, has, or consists of, 18 nucleotides (e.g., 18 consecutive nucleotides) having complementarity with the target domain, e.g., the targeting domain is 18 nucleotides in length.

[0579] In an embodiment, the targeting domain comprises, has, or consists of, 19 nucleotides (e.g., 19 consecutive nucleotides) having complementarity with the target domain, e.g., the targeting domain is 19 nucleotides in length.

[0580] In an embodiment, the targeting domain comprises, has, or consists of, 20 nucleotides (e.g., 20 consecutive nucleotides) having complementarity with the target domain, e.g., the targeting domain is 20 nucleotides in length.

[0581] In an embodiment, the targeting domain comprises, has, or consists of, 21 nucleotides (e.g., 21 consecutive nucleotides) having complementarity with the target domain, e.g., the targeting domain is 21 nucleotides in length.

[0582] In an embodiment, the targeting domain comprises, has, or consists of, 22 nucleotides (e.g., 22 consecutive nucleotides) having complementarity with the target domain, e.g., the targeting domain is 22 nucleotides in length.

[0583] In an embodiment, the targeting domain comprises, has, or consists of, 23 nucleotides (e.g., 23 consecutive nucleotides) having complementarity with the target domain, e.g., the targeting domain is 23 nucleotides in length.

[0584] In an embodiment, the targeting domain comprises, has, or consists of, 24 nucleotides (e.g., 24 consecutive nucleotides) having complementarity with the target domain, e.g., the targeting domain is 24 nucleotides in length.

[0585] In an embodiment, the targeting domain comprises, has, or consists of, 25 nucleotides (e.g., 25 consecutive nucleotides) having complementarity with the target domain, e.g., the targeting domain is 25 nucleotides in length.

[0586] In an embodiment, the targeting domain comprises, has, or consists of, 26 nucleotides (e.g., 26 consecutive nucleotides) having complementarity with the target domain, e.g., the targeting domain is 26 nucleotides in length.

[0587] In an embodiment, the targeting domain comprises, has, or consists of, 16 nucleotides (e.g., 16 consecutive nucleotides) having complementarity with the target domain, e.g., the targeting domain is 16 nucleotides in length; and the proximal and tail domain, when taken together, comprise at least 15, 18, 20, 25, 30, 31, 35, 40, 45, 49, 50, or 53 nucleotides.

[0588] In an embodiment, the targeting domain comprises, has, or consists of, 16 nucleotides (e.g., 16 consecutive nucleotides) having complementarity with the target domain, e.g., the targeting domain is 16 nucleotides in length; and there are at least 15, 18, 20, 25, 30, 31, 35, 40, 45, 49, 50, or 53 nucleotides 3′ to the last nucleotide of the second complementarity domain.

[0589] In an embodiment, the targeting domain comprises, has, or consists of, 16 nucleotides (e.g., 16 consecutive nucleotides) having complementarity with the target domain, e.g., the targeting domain is 16 nucleotides in length; and there are at least 16, 19, 21, 26, 31, 32, 36, 41, 46, 50, 51, or 54 nucleotides 3′ to the last nucleotide of the second complementarity domain that is complementary to its corresponding nucleotide of the first complementarity domain.

[0590] In an embodiment, the targeting domain comprises, has, or consists of, 17 nucleotides (e.g., 17 consecutive nucleotides) having complementarity with the target domain, e.g., the targeting domain is 17 nucleotides in length; and the proximal and tail domain, when taken together, comprise at least 15, 18, 20, 25, 30, 31, 35, 40, 45, 49, 50, or 53 nucleotides.

[0591] In an embodiment, the targeting domain comprises, has, or consists of, 17 nucleotides (e.g., 17 consecutive nucleotides) having complementarity with the target domain, e.g., the targeting domain is 17 nucleotides in length; and there are at least 15, 18, 20, 25, 30, 31, 35, 40, 45, 49, 50, or 53 nucleotides 3′ to the last nucleotide of the second complementarity domain.

[0592] In an embodiment, the targeting domain comprises, has, or consists of, 17 nucleotides (e.g., 17 consecutive nucleotides) having complementarity with the target domain, e.g., the targeting domain is 17 nucleotides in length; and there are at least 16, 19, 21, 26, 31, 32, 36, 41, 46, 50, 51, or 54 nucleotides 3′ to the last nucleotide of the second complementarity domain that is complementary to its corresponding nucleotide of the first complementarity domain.

[0593] In an embodiment, the targeting domain comprises, has, or consists of, 18 nucleotides (e.g., 18 consecutive nucleotides) having complementarity with the target domain, e.g., the targeting domain is 18 nucleotides in length; and the proximal and tail domain, when taken together, comprise at least 15, 18, 20, 25, 30, 31, 35, 40, 45, 49, 50, or 53 nucleotides.

[0594] In an embodiment, the targeting domain comprises, has, or consists of, 18 nucleotides (e.g., 18 consecutive nucleotides) having complementarity with the target domain, e.g., the targeting domain is 18 nucleotides in length; and there are at least 15, 18, 20, 25, 30, 31, 35, 40, 45, 49, 50, or 53 nucleotides 3′ to the last nucleotide of the second complementarity domain.

[0595] In an embodiment, the targeting domain comprises, has, or consists of, 18 nucleotides (e.g., 18 consecutive nucleotides) having complementarity with the target domain, e.g., the targeting domain is 18 nucleotides in length; and there are at least 16, 19, 21, 26, 31, 32, 36, 41, 46, 50, 51, or 54 nucleotides 3′ to the last nucleotide of the second complementarity domain that is complementary to its corresponding nucleotide of the first complementarity domain.

[0596] In an embodiment, the targeting domain comprises, has, or consists of, 19 nucleotides (e.g., 19 consecutive nucleotides) having complementarity with the target domain, e.g., the targeting domain is 19 nucleotides in length; and the proximal and tail domain, when taken together, comprise at least 15, 18, 20, 25, 30, 31, 35, 40, 45, 49, 50, or 53 nucleotides.

[0597] In an embodiment, the targeting domain comprises, has, or consists of, 19 nucleotides (e.g., 19 consecutive nucleotides) having complementarity with the target domain, e.g., the targeting domain is 19 nucleotides in length; and there are at least 15, 18, 20, 25, 30, 31, 35, 40, 45, 49, 50, or 53 nucleotides 3′ to the last nucleotide of the second complementarity domain.

[0598] In an embodiment, the targeting domain comprises, has, or consists of, 19 nucleotides (e.g., 19 consecutive nucleotides) having complementarity with the target domain, e.g., the targeting domain is 19 nucleotides in length; and there are at least 16, 19, 21, 26, 31, 32, 36, 41, 46, 50, 51, or 54 nucleotides 3′ to the last nucleotide of the second complementarity domain that is complementary to its corresponding nucleotide of the first complementarity domain.

[0599] In an embodiment, the targeting domain comprises, has, or consists of, 20 nucleotides (e.g., 20 consecutive nucleotides) having complementarity with the target domain, e.g., the targeting domain is 20 nucleotides in length; and the proximal and tail domain, when taken together, comprise at least 15, 18, 20, 25, 30, 31, 35, 40, 45, 49, 50, or 53 nucleotides.

[0600] In an embodiment, the targeting domain comprises, has, or consists of, 20 nucleotides (e.g., 20 consecutive nucleotides) having complementarity with the target domain, e.g., the targeting domain is 20 nucleotides in length; and there are at least 15, 18, 20, 25, 30, 31, 35, 40, 45, 49, 50, or 53 nucleotides 3′ to the last nucleotide of the second complementarity domain.

[0601] In an embodiment, the targeting domain comprises, has, or consists of, 20 nucleotides (e.g., 20 consecutive nucleotides) having complementarity with the target domain, e.g., the targeting domain is 20 nucleotides in length; and there are at least 16, 19, 21, 26, 31, 32, 36, 41, 46, 50, 51, or 54 nucleotides 3′ to the last nucleotide of the second complementarity domain that is complementary to its corresponding nucleotide of the first complementarity domain.

[0602] In an embodiment, the targeting domain comprises, has, or consists of, 21 nucleotides (e.g., 21 consecutive nucleotides) having complementarity with the target domain, e.g., the targeting domain is 21 nucleotides in length; and the proximal and tail domain, when taken together, comprise at least 15, 18, 20, 25, 30, 31, 35, 40, 45, 49, 50, or 53 nucleotides.

[0603] In an embodiment, the targeting domain comprises, has, or consists of, 21 nucleotides (e.g., 21 consecutive nucleotides) having complementarity with the target domain, e.g., the targeting domain is 21 nucleotides in length; and there are at least 15, 18, 20, 25, 30, 31, 35, 40, 45, 49, 50, or 53 nucleotides 3′ to the last nucleotide of the second complementarity domain.

[0604] In an embodiment, the targeting domain comprises, has, or consists of, 21 nucleotides (e.g., 21 consecutive nucleotides) having complementarity with the target domain, e.g., the targeting domain is 21 nucleotides in length; and there are at least 16, 19, 21, 26, 31, 32, 36, 41, 46, 50, 51, or 54 nucleotides 3′ to the last nucleotide of the second complementarity domain that is complementary to its corresponding nucleotide of the first complementarity domain.

[0605] In an embodiment, the targeting domain comprises, has, or consists of, 22 nucleotides (e.g., 22 consecutive nucleotides) having complementarity with the target domain, e.g., the targeting domain is 22 nucleotides in length; and the proximal and tail domain, when taken together, comprise at least 15, 18, 20, 25, 30, 31, 35, 40, 45, 49, 50, or 53 nucleotides.

[0606] In an embodiment, the targeting domain comprises, has, or consists of, 22 nucleotides (e.g., 22 consecutive nucleotides) having complementarity with the target domain, e.g., the targeting domain is 22 nucleotides in length; and there are at least 15, 18, 20, 25, 30, 31, 35, 40, 45, 49, 50, or 53 nucleotides 3′ to the last nucleotide of the second complementarity domain.

[0607] In an embodiment, the targeting domain comprises, has, or consists of, 22 nucleotides (e.g., 22 consecutive nucleotides) having complementarity with the target domain, e.g., the targeting domain is 22 nucleotides in length; and there are at least 16, 19, 21, 26, 31, 32, 36, 41, 46, 50, 51, or 54 nucleotides 3′ to the last nucleotide of the second complementarity domain that is complementary to its corresponding nucleotide of the first complementarity domain.

[0608] In an embodiment, the targeting domain comprises, has, or consists of, 23 nucleotides (e.g., 23 consecutive nucleotides) having complementarity with the target domain, e.g., the targeting domain is 23 nucleotides in length; and the proximal and tail domain, when taken together, comprise at least 15, 18, 20, 25, 30, 31, 35, 40, 45, 49, 50, or 53 nucleotides.

[0609] In an embodiment, the targeting domain comprises, has, or consists of, 23 nucleotides (e.g., 23 consecutive nucleotides) having complementarity with the target domain, e.g., the targeting domain is 23 nucleotides in length; and there are at least 15, 18, 20, 25, 30, 31, 35, 40, 45, 49, 50, or 53 nucleotides 3′ to the last nucleotide of the second complementarity domain.

[0610] In an embodiment, the targeting domain comprises, has, or consists of, 23 nucleotides (e.g., 23 consecutive nucleotides) having complementarity with the target domain, e.g., the targeting domain is 23 nucleotides in length; and there are at least 16, 19, 21, 26, 31, 32, 36, 41, 46, 50, 51, or 54 nucleotides 3′ to the last nucleotide of the second complementarity domain that is complementary to its corresponding nucleotide of the first complementarity domain.

[0611] In an embodiment, the targeting domain comprises, has, or consists of, 24 nucleotides (e.g., 24 consecutive nucleotides) having complementarity with the target domain, e.g., the targeting domain is 24 nucleotides in length; and the proximal and tail domain, when taken together, comprise at least 15, 18, 20, 25, 30, 31, 35, 40, 45, 49, 50, or 53 nucleotides.

[0612] In an embodiment, the targeting domain comprises, has, or consists of, 24 nucleotides (e.g., 24 consecutive nucleotides) having complementarity with the target domain, e.g., the targeting domain is 24 nucleotides in length; and there are at least 15, 18, 20, 25, 30, 31, 35, 40, 45, 49, 50, or 53 nucleotides 3′ to the last nucleotide of the second complementarity domain.

[0613] In an embodiment, the targeting domain comprises, has, or consists of, 24 nucleotides (e.g., 24 consecutive nucleotides) having complementarity with the target domain, e.g., the targeting domain is 24 nucleotides in length; and there are at least 16, 19, 21, 26, 31, 32, 36, 41, 46, 50, 51, or 54 nucleotides 3′ to the last nucleotide of the second complementarity domain that is complementary to its corresponding nucleotide of the first complementarity domain.

[0614] In an embodiment, the targeting domain comprises, has, or consists of, 25 nucleotides (e.g., 25 consecutive nucleotides) having complementarity with the target domain, e.g., the targeting domain is 25 nucleotides in length; and the proximal and tail domain, when taken together, comprise at least 15, 18, 20, 25, 30, 31, 35, 40, 45, 49, 50, or 53 nucleotides.

[0615] In an embodiment, the targeting domain comprises, has, or consists of, 25 nucleotides (e.g., 25 consecutive nucleotides) having complementarity with the target domain, e.g., the targeting domain is 25 nucleotides in length; and there are at least 15, 18, 20, 25, 30, 31, 35, 40, 45, 49, 50, or 53 nucleotides 3′ to the last nucleotide of the second complementarity domain.

[0616] In an embodiment, the targeting domain comprises, has, or consists of, 25 nucleotides (e.g., 25 consecutive nucleotides) having complementarity with the target domain, e.g., the targeting domain is 25 nucleotides in length; and there are at least 16, 19, 21, 26, 31, 32, 36, 41, 46, 50, 51, or 54 nucleotides 3′ to the last nucleotide of the second complementarity domain that is complementary to its corresponding nucleotide of the first complementarity domain.

[0617] In an embodiment, the targeting domain comprises, has, or consists of, 26 nucleotides (e.g., 26 consecutive nucleotides) having complementarity with the target domain, e.g., the targeting domain is 26 nucleotides in length; and the proximal and tail domain, when taken together, comprise at least 15, 18, 20, 25, 30, 31, 35, 40, 45, 49, 50, or 53 nucleotides.

[0618] In an embodiment, the targeting domain comprises, has, or consists of, 26 nucleotides (e.g., 26 consecutive nucleotides) having complementarity with the target domain, e.g., the targeting domain is 26 nucleotides in length; and there are at least 15, 18, 20, 25, 30, 31, 35, 40, 45, 49, 50, or 53 nucleotides 3′ to the last nucleotide of the second complementarity domain.

[0619] In an embodiment, the targeting domain comprises, has, or consists of, 26 nucleotides (e.g., 26 consecutive nucleotides) having complementarity with the target domain, e.g., the targeting domain is 26 nucleotides in length; and there are at least 16, 19, 21, 26, 31, 32, 36, 41, 46, 50, 51, or 54 nucleotides 3′ to the last nucleotide of the second complementarity domain that is complementary to its corresponding nucleotide of the first complementarity domain.

II. Methods for Designing gRNAs

[0620] Methods for designing gRNAs are described herein, including methods for selecting, designing and validating target domains. Exemplary targeting domains are also provided herein. Targeting Domains discussed herein can be incorporated into the gRNAs described herein.

[0621] Methods for selection and validation of target sequences as well as off-target analyses are described, e.g., in Mali et al., 2013 SCIENCE 339(6121): 823-826; Hsu et al. NAT BIOTECHNOL, 31(9): 827-32; Fu et al., 2014 NAT BIOTECHNOL, doi: 10.1038/nbt.2808. PubMed PMID: 24463574; Heigwer et al., 2014 NAT METHODS 11(2):122-3. doi: 10.1038/nmeth.2812. PubMed PMID: 24481216; Bae et al., 2014 BIOINFORMATICS PubMed PMID: 24463181; Xiao A et al., 2014 BIOINFORMATICS PubMed PMID: 24389662.

[0622] For example, a software tool can be used to optimize the choice of gRNA within a user's target sequence, e.g., to minimize total off-target activity across the genome. Off target activity may be other than cleavage. For each possible gRNA choice using S. pyogenes Cas9, the tool can identify all off-target sequences (preceding either NAG or NGG PAMs) across the genome that contain up to certain number (e.g., 1, 2, 3, 4, 5, 6, 7, 8, 9, or 10) of mismatched base-pairs. The cleavage efficiency at each off-target sequence can be predicted, e.g., using an experimentally-derived weighting scheme. Each possible gRNA is then ranked according to its total predicted off-target cleavage; the top-ranked gRNAs represent those that are likely to have the greatest on-target and the least off-target cleavage. Other functions, e.g., automated reagent design for CRISPR construction, primer design for the on-target Surveyor assay, and primer design for high-throughput detection and quantification of off-target cleavage via next-gen sequencing, can also be included in the tool. Candidate gRNA molecules can be evaluated by art-known methods or as described in Section IV herein.

[0623] Guide RNAs (gRNAs) for use with S. pyogenes, S. aureus and N. meningitidis Cas9s were identified using a DNA sequence searching algorithm. Guide RNA design was carried out using a custom guide RNA design software based on the public tool cas-offinder (reference: Cas-OFFinder: a fast and versatile algorithm that searches for potential off-target sites of Cas9 RNA-guided endonucleases, Bioinformatics. 2014 Feb. 17. Bae S, Park J, Kim J S. PMID:24463181). Said custom guide RNA design software scores guides after calculating their genomewide off-target propensity. Typically matches ranging from perfect matches to 7 mismatches are considered for guides ranging in length from 17 to 24. Once the off-target sites are computationally determined, an aggregate score is calculated for each guide and summarized in a tabular output using a web-interface. In addition to identifying potential gRNA sites adjacent to PAM sequences, the software also identifies all PAM adjacent sequences that differ by 1, 2, 3 or more nucleotides from the selected gRNA sites. Genomic DNA sequence for each gene was obtained from the UCSC Genome browser and sequences were screened for repeat elements using the publically available RepeatMasker program. RepeatMasker searches input DNA sequences for repeated elements and regions of low complexity. The output is a detailed annotation of the repeats present in a given query sequence.

[0624] Following identification, gRNAs were ranked into tiers based on their distance to the target site, their orthogonality or presence of a 5′ G (based on identification of close matches in the human genome containing a relevant PAM, e.g., in the case of S. pyogenes, a NGG PAM, in the case of S. aureus, NNGRR (e.g, a NNGRRT or NNGRRV) PAM, and in the case of N. meningitides, a NNNNGATT or NNNNGCTT PAM. Orthogonality refers to the number of sequences in the human genome that contain a minimum number of mismatches to the target sequence. A “high level of orthogonality” or “good orthogonality” may, for example, refer to 20-mer gRNAs that have no identical sequences in the human genome besides the intended target, nor any sequences that contain one or two mismatches in the target sequence. Targeting domains with good orthogonality are selected to minimize off-target DNA cleavage.

[0625] As an example, for S. pyogenes and N. meningitides targets, 17-mer, or 20-mer gRNAs were designed. As another example, for S. aureus targets, 18-mer, 19-mer, 20-mer, 21-mer, 22-mer, 23-mer and 24-mer gRNAs were designed. Targeting domains, disclosed herein, may comprise the 17-mer described in Tables 1A-1F, 2A-2C, 3A-3E, 4A-4C, 5A-5C, 6A-6E or 7A-7C, e.g., the targeting domains of 18 or more nucleotides may comprise the 17-mer gRNAs described in Tables 1A-1F, 2A-2C, 3A-3E, 4A-4C, 5A-5C, 6A-6E or 7A-7C. Targeting domains, disclosed herein, may comprises the 18-mer described in Tables 1A-1F, 2A-2C, 3A-3E, 4A-4C, 5A-5C, 6A-6E or 7A-7C, e.g., the targeting domains of 19 or more nucleotides may comprise the 18-mer gRNAs described in Tables 1A-1F, 2A-2C, 3A-3E, 4A-4C, 5A-5C, 6A-6E or 7A-7C. Targeting domains, disclosed herein, may comprises the 19-mer described in Tables 1A-1F, 2A-2C, 3A-3E, 4A-4C, 5A-5C, 6A-6E or 7A-7C, e.g., the targeting domains of 20 or more nucleotides may comprise the 19-mer gRNAs described in Tables 1A-1F, 2A-2C, 3A-3E, 4A-4C, 5A-5C, 6A-6E or 7A-7C. Targeting domains, disclosed herein, may comprises the 20-mer gRNAs described in Tables 1A-1F, 2A-2C, 3A-3E, 4A-4C, 5A-5C, 6A-6E or 7A-7C e.g., the targeting domains of 21 or more nucleotides may comprise the 20-mer gRNAs described in Tables 1A-1F, 2A-2C, 3A-3E, 4A-4C, 5A-5C, 6A-6E or 7A-7C. Targeting domains, disclosed herein, may comprises the 21-mer described in Tables 1A-1F, 2A-2C, 3A-3E, 4A-4C, 5A-5C, 6A-6E or 7A-7C e.g., the targeting domains of 22 or more nucleotides may comprise the 21-mer gRNAs described in Tables 1A-1F, 2A-2C, 3A-3E, 4A-4C, 5A-5C, 6A-6E or 7A-7C. Targeting domains, disclosed herein, may comprises the 22-mer described in Tables 1A-1F, 2A-2C, 3A-3E, 4A-4C, 5A-5C, 6A-6E or 7A-7C, e.g., the targeting domains of 23 or more nucleotides may comprise the 22-mer gRNAs described in Tables 1A-1F, 2A-2C, 3A-3E, 4A-4C, 5A-5C, 6A-6E or 7A-7C. Targeting domains, disclosed herein, may comprises the 23-mer described in Tables 1A-1F, 2A-2C, 3A-3E, 4A-4C, 5A-5C, 6A-6E or 7A-7C e.g., the targeting domains of 24 or more nucleotides may comprise the 23-mer gRNAs described in Tables 1A-1F, 2A-2C, 3A-3E, 4A-4C, 5A-5C, 6A-6E or 7A-7C. Targeting domains, disclosed herein, may comprises the 24-mer described in Tables 1A-1F, 2A-2C, 3A-3E, 4A-4C, 5A-5C, 6A-6E or 7A-7C, e.g., the targeting domains of 25 or more nucleotides may comprise the 24-mer gRNAs described in Tables 1A-1F, 2A-2C, 3A-3E, 4A-4C, 5A-5C, 6A-6E or 7A-7C. gRNAs were identified for both single-gRNA nuclease cleavage and for a dual-gRNA paired “nickase” strategy. Criteria for selecting gRNAs and the determination for which gRNAs can be used for which strategy is based on several considerations:

[0626] gRNA pairs should be oriented on the DNA such that PAMs are facing out and cutting with the D10A Cas9 nickase will result in 5′ overhangs.

[0627] An assumption that cleaving with dual nickase pairs will result in deletion of the entire intervening sequence at a reasonable frequency. However, it will also often result in indel mutations at the site of only one of the gRNAs. Candidate pair members can be tested for how efficiently they remove the entire sequence versus just causing indel mutations at the site of one gRNA.

[0628] The Targeting Domains discussed herein can be incorporated into the gRNAs described herein.

Strategies to Identify gRNAs for S. pyogenes, S. Aureus, and N. meningitides to Knock Out the CCR5 Gene

[0629] As an example, two strategies were utilized to identify gRNAs for use with S. pyogenes, S. aureus and N. meningitidis Cas9 enzymes.

[0630] In one strategy, gRNAs were designed for use with S. pyogenes Cas9 enzymes (Tables 1A-1D). While it can be desirable to have gRNAs start with a 5′ G, this requirement was relaxed for some gRNAs in tier 1 in order to identify guides in the correct orientation, within a reasonable distance to the mutation and with a high level of orthogonality. In order to find a pair for the dual-nickase strategy it was necessary to either extend the distance from the mutation or remove the requirement for the 5′G. For selection of tier 2 gRNAs, the distance restriction was relaxed in some cases such that a longer sequence was scanned, but the 5′G was required for all gRNAs. Whether or not the distance requirement was relaxed depended on how many sites were found within the original search window. Tier 3 uses the same distance restriction as tier 2, but removes the requirement for a 5′G. Note that tiers are non-inclusive (each gRNA is listed only once). Tier 4 gRNAs were selected based on location in coding sequence of gene.

[0631] As discussed above, gRNAs were identified for single-gRNA nuclease cleavage as well as for a dual-gRNA paired “nickase” strategy, as indicated.

[0632] gRNAs for use with the Neisseria meningitidis and Staphylococcus aureus Cas9s were identified manually by scanning genomic DNA sequence for the presence of PAM sequences. These gRNAs were not separated into tiers, but are provided in single lists for each species (Table 1E for S. aureus and Table 1F for N. meningitides).

[0633] As discussed above, gRNAs were identified for single-gRNA nuclease cleavage as well as for a dual-gRNA paired “nickase” strategy, as indicated.

[0634] In another strategy, gRNAs were designed for use with S. pyogenes, S. aureus and N. meningitidis Cas9 enzymes. The gRNAs were identified and ranked into 3 tiers for S. pyogenes (Tables 2A-2C). The targeting domain to be used with S. pyogenes Cas9 enzymes for tier 1 gRNA molecules were selected based on (1) distance to a target site (e.g., start codon), e.g., within 500 bp (e.g., downstream) of the target site (e.g., start codon) and (2) a high level of orthogonality. The targeting domain to be used with S. pyogenes Cas9 enzymes for tier 2 gRNA molecules were selected based on (1) distance to the target site (e.g., start codon), e.g., within 500 bp (e.g., downstream) of the target site (e.g., start codon). The targeting domain to be used with S. pyogenes Cas9 enzymes for tier 3 gRNA molecules were selected based on distance to the target site (e.g., start codon), e.g., within reminder of the coding sequence, e.g., downstream of the first 500 bp of coding sequence (e.g., anywhere from +500 (relative to the start codon) to the stop codon). The gRNAs were identified and ranked into 5 tiers for S. aureus, when the relevant PAM was NNGRRT or NNGRRV (Tables 3A-3E). The targeting domain to be used with S. aureus Cas9 enzymes for tier 1 gRNA molecules were selected based on (1) distance to the target site (e.g., start codon), e.g., within 500 bp (e.g., downstream) of the target site (e.g., start codon), (2) a high level of orthogonality, and (3) PAM is NNGRRT. The targeting domain to be used with S. aureus Cas9 enzymes for tier 2 gRNA molecules were selected based on (1) distance to the target site (e.g., start codon), e.g., within 500 bp (e.g., downstream) of the target site (e.g., start codon), and (2) PAM is NNGRRT. The targeting domain to be used with S. aureus Cas9 enzymes for tier 3 gRNA molecules were selected based on (1) distance to a the target site (e.g., start codon), e.g., within 500 bp (e.g., downstream) of the target site (e.g., start codon), and (2) PAM is NNGRRV. The targeting domain to be used with S. aureus Cas9 enzymes for tier 4 gRNA molecules were selected based on (1) distance to the target site (e.g., start codon), e.g., within reminder of the coding sequence, e.g., downstream of the first 500 bp of coding sequence (e.g., anywhere from +500 (relative to the start codon) to the stop codon), and (2) PAM is NNGRRT. The targeting domain to be used with S. aureus Cas9 enzymes for tier 5 gRNA molecules were selected based on (1) distance to the target site (e.g., start codon), e.g., within reminder of the coding sequence, e.g., downstream of the first 500 bp of coding sequence (e.g., anywhere from +500 (relative to the start codon) to the stop codon), and (2) PAM is NNGRRV. The gRNAs were identified and ranked into 3 tiers for N. meningitidis (Tables 4A-4C). The targeting domain to be used with N. meningitidis Cas9 enzymes for tier 1 gRNA molecules were selected based on (1) distance to the target site, e.g., within 500 bp (e.g., downstream) of the target site (e.g., start codon) and (2) a high level of orthogonality. The targeting domain to be used with N. meningitidis Cas9 enzymes for tier 2 gRNA molecules were selected based on (1) distance to the target site (e.g., start codon), e.g., within 500 bp (e.g., downstream) of the target site (e.g., start codon). The targeting domain to be used with N. meningitidis Cas9 enzymes for tier 3 gRNA molecules were selected based on distance to the target site (e.g., start codon), e.g., within reminder of the coding sequence, e.g., downstream of the first 500 bp of coding sequence (e.g., anywhere from +500 (relative to the start codon) to the stop codon). Note that tiers are non-inclusive (each gRNA is listed only once for the strategy). In certain instances, no gRNA was identified based on the criteria of the particular tier.

[0635] In an embodiment, when a single gRNA molecule is used to target a Cas9 nickase to create a single strand break in close proximity to the CCR5 target position, e.g., the gRNA is used to target either upstream of (e.g., within 500 bp, e.g., within 200 bp upstream of the CCR5 target position), or downstream of (e.g., within 500 bp, e.g., within 200 bp downstream of the CCR5 target position) in the CCR5 gene.

[0636] In an embodiment, when a single gRNA molecule is used to target a Cas9 nuclease to create a double strand break to in close proximity to the CCR5 target position, e.g., the gRNA is used to target either upstream of (e.g., within 500 bp, e.g., within 200 bp upstream of the CCR5 target position), or downstream of (e.g., within 500 bp, e.g., within 200 bp downstream of the CCR5 target position) in the CCR5 gene.

[0637] In an embodiment, dual targeting is used to create two double strand breaks to in close proximity to the mutation, e.g., the gRNA is used to target either upstream of (e.g., within 500 bp, e.g., within 200 bp upstream of the CCR5 target position), or downstream of (e.g., within 500 bp, e.g., within 200 bp downstream of the CCR5 target position) in the CCR5 gene. In an embodiment, the first and second gRNAs are used to target two Cas9 nucleases to flank, e.g., the first of gRNA is used to target upstream of (e.g., within 500 bp, e.g., within 200 bp upstream of the CCR5 target position), and the second gRNA is used to target downstream of (e.g., within 500 bp, e.g., within 200 bp downstream of the CCR5 target position) in the CCR5 gene.

[0638] In an embodiment, dual targeting is used to create a double strand break and a pair of single strand breaks to delete a genomic sequence including the CCR5 target position. In an embodiment, the first, second and third gRNAs are used to target one Cas9 nuclease and two Cas9 nickases to flank, e.g., the first gRNA that will be used with the Cas9 nuclease is used to target upstream of (e.g., within 500 bp, e.g., within 200 bp upstream of the CCR5 target position) or downstream of (e.g., within 500 bp, e.g., within 200 bp downstream of the CCR5 target position), and the second and third gRNAs that will be used with the Cas9 nickase pair are used to target the opposite side of the mutation (e.g., within 200 bp upstream or downstream of the CCR5 target position) in the CCR5 gene.

[0639] In an embodiment, when four gRNAs (e.g., two pairs) are used to target four Cas9 nickases to create four single strand breaks to delete genomic sequence including the mutation, the first pair and second pair of gRNAs are used to target four Cas9 nickases to flank, e.g., the first pair of gRNAs are used to target upstream of (e.g., within 500 bp, e.g., within 200 bp upstream of the CCR5 target position), and the second pair of gRNAs are used to target downstream of (e.g., within 500 bp, e.g., within 200 bp downstream of the CCR5 target position) in the CCR5 gene.

Strategies to Identify gRNAs for S. pyogenes, S. Aureus, and N. meningitides to Knock Down the CCR5 Gene

[0640] In yet another strategy, gRNAs were designed for use with S. pyogenes, S. aureus and N. meningitidis Cas9 enzymes. The gRNAs were identified and ranked into 3 tiers for S. pyogenes (Tables 5A-5C). The targeting domain to be used with S. pyogenes Cas9 enzymes for tier 1 gRNA molecules were selected based on (1) distance to a target site (e.g., the transcription start site), e.g., within 500 bp (e.g., upstream or downstream) of the target site (e.g., the transcription start site) and (2) a high level of orthogonality. The targeting domain to be used with S. pyogenes Cas9 enzymes for tier 2 gRNA molecules were selected based on (1) distance to the target site (e.g., the transcription start site), e.g., within 500 bp (e.g., upstream or downstream) of the target site (e.g., the transcription start site). The targeting domain to be used with S. pyogenes Cas9 enzymes for tier 3 gRNA molecules were selected based on distance to the target site (e.g., the transcription start site), e.g., within the additional 500 bp upstream and downstream of the transcription start site (i.e., extending to 1 kb upstream and downstream of the transcription start site. The gRNAs were identified and ranked into 5 tiers for S. aureus, when the relevant PAM was NNGRRT or NNGRRV (Tables 6A-6E). The targeting domain to be used with S. aureus Cas9 enzymes for tier 1 gRNA molecules were selected based on (1) distance to the target site (e.g., the transcription start site), e.g., within 500 bp (e.g., upstream or downstream) of the target site (e.g., the transcription start site), (2) a high level of orthogonality, and (3) PAM is NNGRRT. The targeting domain to be used with S. aureus Cas9 enzymes for tier 2 gRNA molecules were selected based on (1) distance to the target site (e.g., the transcription start site), e.g., within 500 bp (e.g., upstream or downstream) of the target site (e.g., the transcription start site), and (2) PAM is NNGRRT. The targeting domain to be used with S. aureus Cas9 enzymes for tier 3 gRNA molecules were selected based on (1) distance to a target site (e.g., the transcription start site), e.g., within 500 bp (e.g., upstream or downstream) of the target site (e.g., the transcription start site), and (2) PAM is NNGRRV. The targeting domain to be used with S. aureus Cas9 enzymes for tier 4 gRNA molecules were selected based on (1) distance to the target site (e.g., the transcription start site), e.g., within the additional 500 bp upstream and downstream of the transcription start site (i.e., extending to 1 kb upstream and downstream of the transcription start site, and (2) PAM is NNGRRT. The targeting domain to be used with S. aureus Cas9 enzymes for tier 5 gRNA molecules were selected based on (1) distance to the target site (e.g., the transcription start site), e.g., within the additional 500 bp upstream and downstream of the transcription start site (i.e., extending to 1 kb upstream and downstream of the transcription start site, and (2) PAM is NNGRRV. The gRNAs were identified and ranked into 3 tiers for N. meningitidis (Tables 7A-7C). The targeting domain to be used with N. meningitidis Cas9 enzymes for tier 1 gRNA molecules were selected based on (1) distance to a target site (e.g., the transcription start site), e.g., within 500 bp (e.g., upstream or downstream) of the target site (e.g., the transcription start site) and (2) a high level of orthogonality. The targeting domain to be used with N. meningitidis Cas9 enzymes for tier 2 gRNA molecules were selected based on (1) distance to the target site (e.g., the transcription start site), e.g., within 500 bp (e.g., upstream or downstream) of the target site (e.g., the transcription start site). The targeting domain to be used with N. meningitidis Cas9 enzymes for tier 3 gRNA molecules were selected based on distance to the target site (e.g., the transcription start site), e.g., within the additional 500 bp upstream and downstream of the transcription start site (i.e., extending to 1 kb upstream and downstream of the transcription start site. Note that tiers are non-inclusive (each gRNA is listed only once for the strategy). In certain instances, no gRNA was identified based on the criteria of the particular tier.

[0641] Any of the targeting domains in the tables described herein can be used with a Cas9 nickase molecule to generate a single strand break.

[0642] Any of the targeting domains in the tables described herein can be used with a Cas9 nuclease molecule to generate a double strand break.

[0643] In an embodiment, dual targeting (e.g., dual nicking) is used to create two nicks on opposite DNA strands by using S. pyogenes, S. aureus and N. meningitidis Cas9 nickases with two targeting domains that are complementary to opposite DNA strands, e.g., a gRNA comprising any minus strand targeting domain may be paired any gRNA comprising a plus strand targeting domain provided that the two gRNAs are oriented on the DNA such that PAMs face outward and the distance between the 5′ ends of the gRNAs is 0-50 bp.

[0644] When two gRNAs designed for use to target two Cas9 molecules, one Cas9 can be one species, the second Cas9 can be from a different species. Both Cas9 species are used to generate a single or double-strand break, as desired.

### Exemplary Targeting Domains

[0645] Table 1A provides exemplary targeting domains for knocking out the CCR5 gene selected according to first tier parameters, and are selected based on the presence of a 5′ G (except for CCR5-51, -52, -60, -63, -64 and -66), close proximity to the start codon and orthogonality in the human genome. In an embodiment, the targeting domain is the exact complement of the target domain. Any of the targeting domains in the table can be used with a Cas9 molecule (e.g., a S. pyogenes Cas9 molecule) that gives double stranded cleavage. Any of the targeting domains in the table can be used with Cas9 single-stranded break nucleases (nickases) (e.g., S. pyogenes Cas9 single-stranded break nucleases). In an embodiment, dual targeting is used to create two nicks. When selecting gRNAs for use in a nickase pair, one gRNA targets a domain in the complementary strand and the second gRNA targets a domain in the non-complementary strand. In an embodiment, two 20-mer guide RNAs are used to target two S. pyogenes Cas9 nucleases or two S. pyogenes Cas9 nickases, e.g., CCR5-63 and CCR5-49, or CCR5-63 and CCR5-41 are used. In an embodiment, two 17-mer guide RNAs are used to target two Cas9 nucleases or two Cas9 nickases, e.g., CCR5-4 and CCR5-3 are used.

TABLE 1A
1st Tier

| | | | | SEQ |
|---|---|---|---|---|
| gRNA | DNA | | Target Site | ID |
| Name | Strand | Targeting Domain | Length | NO |
| CCR5-66 | − | CCUGCCUCCGCUCUACUCAC | 20 | 387 |
| CCR5-43 | − | GCUGCCGCCCAGUGGGACUU | 20 | 388 |
| CCR5-51 | − | ACAAUGUGUCAACUCUUGAC | 20 | 389 |
| CCR5-58 | − | GGUGACAAGUGUGAUCACUU | 20 | 390 |
| CCR5-60 | + | CCAGGUACCUAUCGAUUGUC | 20 | 391 |
| CCR5-63 | + | CUUCACAUUGAUUUUUUGGC | 20 | 392 |
| CCR5-47 | + | GCAGCAUAGUGAGCCCAGAA | 20 | 393 |
| CCR5-45 | + | GGUACCUAUCGAUUGUCAGG | 20 | 394 |
| CCR5-49 | + | GUGAGUAGAGCGGAGGCAGG | 20 | 395 |
| CCR5-1 | − | GCCUCCGCUCUACUCAC | 17 | 396 |
| CCR5-3 | − | GCCGCCCAGUGGGACUU | 17 | 397 |
| CCR5-52 | − | AUGUGUCAACUCUUGAC | 17 | 398 |
| CCR5-10 | − | GACAAUCGAUAGGUACC | 17 | 399 |
| CCR5-64 | + | CACAUUGAUUUUUUGGC | 17 | 400 |
| CCR5-4 | + | GCAUAGUGAGCCCAGAA | 17 | 401 |
| CCR5-14 | + | GGUACCUAUCGAUUGUC | 17 | 402 |

[0646] Table 1B provides exemplary targeting domains for knocking out the CCR5 gene selected according to the second tier parameters and are selected based on the presence of a 5′ G and close proximity to the start codon. In an embodiment, the targeting domain is the exact complement of the target domain. Any of the targeting domains in the table can be used with a S. pyogenes Cas9 molecule that gives double stranded cleavage. Any of the targeting domains in the table can be used with a S. pyogenes Cas9 single-stranded break nucleases (nickases). In an embodiment, dual targeting is used to create two nicks.

TABLE 1B
2nd Tier

| | | | Target | |
|---|---|---|---|---|
| gRNA | DNA | | Site | SEQ |
| Name | Strand | Targeting Domain | Length | ID NO |
| CCR5-5 | + | GAAAAACAGGUCAGAGA | 17 | 403 |
| CCR5-13 | − | GACAAGUGUGAUCACUU | 17 | 404 |
| CCR5-85 | − | GACAAGUGUGAUCACUUGGG | 20 | 405 |
| CCR5-12 | − | GACGGUCACCUUUGGGG | 17 | 406 |
| CCR5-8 | + | GAGCGGAGGCAGGAGGC | 17 | 407 |
| CCR5-11 | − | GCCAGGACGGUCACCUU | 17 | 408 |
| CCR5-6 | + | GCCUUUUGCAGUUUAUC | 17 | 409 |
| CCR5-59 | − | GCUGUGUUUGCGUCUCUCCC | 20 | 410 |
| CCR5-9 | + | GCUUCACAUUGAUUUUU | 17 | 411 |
| CCR5-48 | + | GGACAGUAAGAAGGAAAAAC | 20 | 412 |
| CCR5-46 | + | GGCAGCAUAGUGAGCCCAGA | 20 | 413 |
| CCR5-41 | − | GGUGUUCAUCUUUGGUUUUG | 20 | 414 |
| CCR5-50 | + | GUAGAGCGGAGGCAGGAGGC | 20 | 415 |
| CCR5-7 | + | GUGAGUAGAGCGGAGGC | 17 | 416 |
| CCR5-42 | − | GUGUUCAUCUUUGGUUUUGU | 20 | 417 |
| CCR5-129 | − | GUGUUUGCGUCUCUCCC | 17 | 418 |
| CCR5-2 | − | GUUCAUCUUUGGUUUUG | 17 | 419 |
| CCR5-79 | − | GUUUGCUUUAAAAGCCAGGA | 20 | 420 |

[0647] Table 1C provides exemplary targeting domains for knocking out the CCR5 gene selected according to the third tier parameters and are selected based on close proximity to the start codon. In an embodiment, the targeting domain is the exact complement of the target domain. Any of the targeting domains in the table can be used with a S. pyogenes Cas9 molecule that gives double stranded cleavage. Any of the targeting domains in the table can be used with a S. pyogenes Cas9 single-stranded break nucleases (nickases). In an embodiment, dual targeting is used to create two nicks.

TABLE 1C
3rd Tier

| | | | Target | |
|---|---|---|---|---|
| gRNA | DNA | | Site | SEQ |
| Name | Strand | Targeting Domain | Length | ID NO |
| CCR5-87 | + | AAAACAGGUCAGAGAUGGCC | 20 | 421 |
| CCR5-80 | − | AAAGCCAGGACGGUCACCUU | 20 | 422 |
| CCR5-130 | + | AACACCAGUGAGUAGAG | 17 | 423 |
| CCR5-88 | + | AACACCAGUGAGUAGAGCGG | 20 | 424 |
| CCR5-81 | − | AAGCCAGGACGGUCACCUUU | 20 | 425 |
| CCR5-89 | + | AAGGAAAAACAGGUCAGAGA | 20 | 426 |
| CCR5-127 | − | AAGUGUGAUCACUUGGG | 17 | 427 |
| CCR5-86 | − | AAGUGUGAUCACUUGGGUGG | 20 | 428 |
| CCR5-90 | + | ACACAGCAUGGACGACAGCC | 20 | 429 |
| CCR5-119 | − | ACAGGGCUCUAUUUUAU | 17 | 430 |
| CCR5-131 | + | ACAGGUCAGAGAUGGCC | 17 | 431 |
| CCR5-132 | + | ACAUUGAUUUUUUGGCA | 17 | 432 |
| CCR5-133 | + | ACCAGUGAGUAGAGCGG | 17 | 433 |
| CCR5-134 | + | ACCUAUCGAUUGUCAGG | 17 | 434 |
| CCR5-115 | − | ACUAUGCUGCCGCCCAG | 17 | 435 |
| CCR5-135 | + | ACUUGUCACCACCCCAA | 17 | 436 |
| CCR5-136 | + | AGAAGGGGACAGUAAGA | 17 | 437 |
| CCR5-137 | + | AGAGCGGAGGCAGGAGG | 17 | 438 |
| CCR5-138 | + | AGAUGGCCAGGUUGAGC | 17 | 439 |
| CCR5-139 | + | AGCAUAGUGAGCCCAGA | 17 | 440 |
| CCR5-82 | − | AGCCAGGACGGUCACCUUUG | 20 | 441 |
| CCR5-65 | + | AGUAGAGCGGAGGCAGG | 17 | 442 |
| CCR5-91 | + | AGUAGAGCGGAGGCAGGAGG | 20 | 443 |
| CCR5-92 | + | AUGAACACCAGUGAGUAGAG | 20 | 444 |
| CCR5-141 | + | AUUUCCAAAGUCCCACU | 17 | 445 |
| CCR5-93 | + | AUUUCCAAAGUCCCACUGGG | 20 | 446 |
| CCR5-76 | − | CAAUGUGUCAACUCUUGACA | 20 | 447 |
| CCR5-94 | + | CACACUUGUCACCACCCCAA | 20 | 448 |
| CCR5-95 | + | CACCCCAAAGGUGACCGUCC | 20 | 449 |
| CCR5-96 | + | CAGAGAUGGCCAGGUUGAGC | 20 | 450 |
| CCR5-97 | + | CAGCAUAGUGAGCCCAGAAG | 20 | 451 |
| CCR5-143 | + | CAGCAUGGACGACAGCC | 17 | 452 |
| CCR5-125 | − | CAGGACGGUCACCUUUG | 17 | 453 |
| CCR5-83 | − | CAGGACGGUCACCUUUGGGG | 20 | 454 |
| CCR5-144 | + | CAGUAAGAAGGAAAAAC | 17 | 455 |
| CCR5-145 | + | CAUAGUGAGCCCAGAAG | 17 | 456 |
| CCR5-107 | − | CAUCAAUUAUUAUACAU | 17 | 457 |
| CCR5-112 | − | CAUCUACCUGCUCAACC | 17 | 458 |
| CCR5-124 | − | CCAGGACGGUCACCUUU | 17 | 459 |
| CCR5-98 | + | CCAGUGAGUAGAGCGGAGGC | 20 | 460 |
| CCR5-146 | + | CCCAAAGGUGACCGUCC | 17 | 461 |
| CCR5-99 | + | CCCAGAAGGGGACAGUAAGA | 20 | 462 |
| CCR5-57 | − | CCUGACAAUCGAUAGGUACC | 20 | 463 |
| CCR5-73 | − | CCUUCUUACUGUCCCCUUCU | 20 | 464 |
| CCR5-116 | − | CUAUGCUGCCGCCCAGU | 17 | 465 |
| CCR5-74 | − | CUCACUAUGCUGCCGCCCAG | 20 | 466 |
| CCR5-78 | − | CUGUGUUUGCUUUAAAAGCC | 20 | 467 |
| CCR5-100 | + | CUUUUAAAGCAAACACAGCA | 20 | 468 |
| CCR5-101 | + | UAAUAAUUGAUGUCAUAGAU | 20 | 469 |
| CCR5-147 | + | UAAUUGAUGUCAUAGAU | 17 | 470 |
| CCR5-68 | − | UACUCACUGGUGUUCAUCUU | 20 | 471 |
| CCR5-148 | + | UAUUUCCAAAGUCCCAC | 17 | 472 |
| CCR5-77 | − | UAUUUUAUAGGCUUCUUCUC | 20 | 473 |
| CCR5-75 | − | UCACUAUGCUGCCGCCCAGU | 20 | 474 |
| CCR5-108 | − | UCACUGGUGUUCAUCUU | 17 | 475 |
| CCR5-62 | + | UCAGCCUUUUGCAGUUUAUC | 20 | 476 |
| CCR5-55 | − | UCAUCCUCCUGACAAUCGAU | 20 | 477 |
| CCR5-70 | − | UCAUCCUGAUAAACUGCAAA | 20 | 478 |
| CCR5-149 | + | UCCAAAGUCCCACUGGG | 17 | 479 |
| CCR5-121 | − | UCCUCCUGACAAUCGAU | 17 | 480 |
| CCR5-111 | − | UCCUGAUAAACUGCAAA | 17 | 481 |
| CCR5-72 | − | UCCUUCUUACUGUCCCCUUC | 20 | 482 |
| CCR5-114 | − | UCUUACUGUCCCCUUCU | 17 | 483 |
| CCR5-126 | − | UGACAAGUGUGAUCACU | 17 | 484 |
| CCR5-67 | − | UGACAUCAAUUAUUAUACAU | 20 | 485 |
| CCR5-71 | − | UGACAUCUACCUGCUCAACC | 20 | 486 |
| CCR5-150 | + | UGCAGUUUAUCAGGAUG | 17 | 487 |
| CCR5-123 | − | UGCUUUAAAAGCCAGGA | 17 | 488 |
| CCR5-84 | − | UGGUGACAAGUGUGAUCACU | 20 | 489 |
| CCR5-69 | − | UGGUUUUGUGGGCAACAUGC | 20 | 490 |
| CCR5-102 | + | UGUAUUUCCAAAGUCCCACU | 20 | 491 |
| CCR5-128 | − | UGUGAUCACUUGGGUGG | 17 | 492 |
| CCR5-118 | − | UGUGUCAACUCUUGACA | 17 | 493 |
| CCR5-122 | − | UGUUUGCUUUAAAAGCC | 17 | 494 |
| CCR5-151 | + | UUAAAGCAAACACAGCA | 17 | 495 |
| CCR5-103 | + | UUCACAUUGAUUUUUUGGCA | 20 | 496 |
| CCR5-109 | − | UUCAUCUUUGGUUUUGU | 17 | 497 |
| CCR5-113 | − | UUCUUACUGUCCCCUUC | 17 | 498 |
| CCR5-53 | − | UUGACAGGGCUCUAUUUUAU | 20 | 499 |
| CCR5-104 | + | UUGUAUUUCCAAAGUCCCAC | 20 | 500 |
| CCR5-120 | − | UUUAUAGGCUUCUUCUC | 17 | 501 |
| CCR5-105 | + | UUUGCUUCACAUUGAUUUUU | 20 | 502 |
| CCR5-106 | + | UUUUGCAGUUUAUCAGGAUG | 20 | 503 |
| CCR5-110 | − | UUUUGUGGGCAACAUGC | 17 | 504 |

[0648] Table 1D provides exemplary targeting domains for knocking out the CCR5 gene selected according to the fourth tier parameters and are selected on location in coding sequence of gene. In an embodiment, the targeting domain is the exact complement of the target domain. Any of the targeting domains in the table can be used with a S. pyogenes Cas9 molecule that gives double stranded cleavage. Any of the targeting domains in the table can be used with a S. pyogenes Cas9 single-stranded break nucleases (nickases). In an embodiment, dual targeting is used to create two nicks.

TABLE 1D
4th Tier

| | | | Target | |
|---|---|---|---|---|
| gRNA | DNA | | Site | SEQ |
| Name | Strand | Targeting Domain | Length | ID NO |
| CCR5-152 | − | CAUACAGUCAGUAUCAAUUC | 20 | 505 |
| CCR5-153 | − | GACAUUAAAGAUAGUCAUCU | 20 | 506 |
| CCR5-154 | − | ACAUUAAAGAUAGUCAUCUU | 20 | 507 |
| CCR5-155 | − | CAUUAAAGAUAGUCAUCUUG | 20 | 508 |
| CCR5-156 | − | AAAGAUAGUCAUCUUGGGGC | 20 | 509 |
| CCR5-157 | − | GGUCCUGCCGCUGCUUGUCA | 20 | 510 |
| CCR5-158 | − | UGUCAUGGUCAUCUGCUACU | 20 | 511 |
| CCR5-159 | − | GUCAUGGUCAUCUGCUACUC | 20 | 512 |
| CCR5-160 | − | GAAUCCUAAAAACUCUGCUU | 20 | 513 |
| CCR5-161 | − | GGUGUCGAAAUGAGAAGAAG | 20 | 514 |
| CCR5-162 | − | GAAAUGAGAAGAAGAGGCAC | 20 | 515 |
| CCR5-163 | − | AAAUGAGAAGAAGAGGCACA | 20 | 516 |
| CCR5-164 | − | AGAAGAGGCACAGGGCUGUG | 20 | 517 |
| CCR5-165 | − | UGAUUGUUUAUUUUCUCUUC | 20 | 518 |
| CCR5-166 | − | GAUUGUUUAUUUUCUCUUCU | 20 | 519 |
| CCR5-167 | − | CCUUCUCCUGAACACCUUCC | 20 | 520 |
| CCR5-168 | − | AACACCUUCCAGGAAUUCUU | 20 | 521 |
| CCR5-169 | − | AUAAUUGCAGUAGCUCUAAC | 20 | 522 |
| CCR5-170 | − | UUGCAGUAGCUCUAACAGGU | 20 | 523 |
| CCR5-171 | − | CAGGUUGGACCAAGCUAUGC | 20 | 524 |
| CCR5-172 | − | AUGCAGGUGACAGAGACUCU | 20 | 525 |
| CCR5-173 | − | UGCAGGUGACAGAGACUCUU | 20 | 526 |
| CCR5-174 | − | CCCAUCAUCUAUGCCUUUGU | 20 | 527 |
| CCR5-175 | − | CCAUCAUCUAUGCCUUUGUC | 20 | 528 |
| CCR5-176 | − | CAUCAUCUAUGCCUUUGUCG | 20 | 529 |
| CCR5-177 | − | CUGUUCUAUUUUCCAGCAAG | 20 | 530 |
| CCR5-178 | − | UCAGUUUACACCCGAUCCAC | 20 | 531 |
| CCR5-179 | − | CAGUUUACACCCGAUCCACU | 20 | 532 |
| CCR5-180 | − | AGUUUACACCCGAUCCACUG | 20 | 533 |
| CCR5-181 | − | CACCCGAUCCACUGGGGAGC | 20 | 534 |
| CCR5-182 | − | UGGGGAGCAGGAAAUAUCUG | 20 | 535 |
| CCR5-183 | − | GGGGAGCAGGAAAUAUCUGU | 20 | 536 |
| CCR5-184 | − | AUAUCUGUGGGCUUGUGACA | 20 | 537 |
| CCR5-185 | − | GCUUGUGACACGGACUCAAG | 20 | 538 |
| CCR5-186 | − | CUUGUGACACGGACUCAAGU | 20 | 539 |
| CCR5-187 | − | UGACACGGACUCAAGUGGGC | 20 | 540 |
| CCR5-188 | − | CCCAGUCAGAGUUGUGCACA | 20 | 541 |
| CCR5-189 | − | CUUAGUUUUCAUACACAGCC | 20 | 542 |
| CCR5-190 | − | UUAGUUUUCAUACACAGCCU | 20 | 543 |
| CCR5-191 | − | UUUUCAUACACAGCCUGGGC | 20 | 544 |
| CCR5-192 | − | UUUCAUACACAGCCUGGGCU | 20 | 545 |
| CCR5-193 | − | UUCAUACACAGCCUGGGCUG | 20 | 546 |
| CCR5-194 | − | UCAUACACAGCCUGGGCUGG | 20 | 547 |
| CCR5-195 | − | UACACAGCCUGGGCUGGGGG | 20 | 548 |
| CCR5-196 | − | ACACAGCCUGGGCUGGGGGU | 20 | 549 |
| CCR5-197 | − | CACAGCCUGGGCUGGGGGUG | 20 | 550 |
| CCR5-198 | − | AGCCUGGGCUGGGGGUGGGG | 20 | 551 |
| CCR5-199 | − | GCCUGGGCUGGGGGUGGGGU | 20 | 552 |
| CCR5-200 | − | GGCUGGGGGUGGGGUGGGAG | 20 | 553 |
| CCR5-201 | − | UGGGAGAGGUCUUUUUUAAA | 20 | 554 |
| CCR5-202 | − | AAAGGAAGUUACUGUUAUAG | 20 | 555 |
| CCR5-203 | − | AAGGAAGUUACUGUUAUAGA | 20 | 556 |
| CCR5-204 | − | CUAAGAUUCAUCCAUUUAUU | 20 | 557 |
| CCR5-205 | − | ACAACUUUUUACCUAGUACA | 20 | 558 |
| CCR5-206 | − | CCUAGUACAAGGCAACAUAU | 20 | 559 |
| CCR5-207 | − | GUUGUAAAUGUGUUUAAAAC | 20 | 560 |
| CCR5-208 | − | AACAGGUCUUUGUCUUGCUA | 20 | 561 |
| CCR5-209 | − | ACAGGUCUUUGUCUUGCUAU | 20 | 562 |
| CCR5-210 | − | CAGGUCUUUGUCUUGCUAUG | 20 | 563 |
| CCR5-211 | − | CAUGUGUGAUUUCCCCUCCA | 20 | 564 |
| CCR5-212 | − | GUGAUUUCCCCUCCAAGGUA | 20 | 565 |
| CCR5-213 | − | AGUUUCACUGACUUAGAACC | 20 | 566 |
| CCR5-214 | − | AGAACCAGGCGAGAGACUUG | 20 | 567 |
| CCR5-215 | − | CAGGCGAGAGACUUGUGGCC | 20 | 568 |
| CCR5-216 | − | AGGCGAGAGACUUGUGGCCU | 20 | 569 |
| CCR5-217 | − | GACUUGUGGCCUGGGAGAGC | 20 | 570 |
| CCR5-218 | − | ACUUGUGGCCUGGGAGAGCU | 20 | 571 |
| CCR5-219 | − | CUUGUGGCCUGGGAGAGCUG | 20 | 572 |
| CCR5-220 | − | GGGAAGCUUCUUAAAUGAGA | 20 | 573 |
| CCR5-221 | − | AAAUGAGAAGGAAUUUGAGU | 20 | 574 |
| CCR5-222 | − | UGAGUUGGAUCAUCUAUUGC | 20 | 575 |
| CCR5-223 | − | GCCUCACUGCAAGCACUGCA | 20 | 576 |
| CCR5-224 | − | CCUCACUGCAAGCACUGCAU | 20 | 577 |
| CCR5-225 | − | AAGCACUGCAUGGGCAAGCU | 20 | 578 |
| CCR5-226 | − | UGGGCAAGCUUGGCUGUAGA | 20 | 579 |
| CCR5-227 | − | GCUGUAGAAGGAGACAGAGC | 20 | 580 |
| CCR5-228 | − | UAGAAGGAGACAGAGCUGGU | 20 | 581 |
| CCR5-229 | − | AGAAGGAGACAGAGCUGGUU | 20 | 582 |
| CCR5-230 | − | CAGAGCUGGUUGGGAAGACA | 20 | 583 |
| CCR5-231 | − | AGAGCUGGUUGGGAAGACAU | 20 | 584 |
| CCR5-232 | − | GAGCUGGUUGGGAAGACAUG | 20 | 585 |
| CCR5-233 | − | CUGGUUGGGAAGACAUGGGG | 20 | 586 |
| CCR5-234 | − | UUGGGAAGACAUGGGGAGGA | 20 | 587 |
| CCR5-235 | − | AGACAUGGGGAGGAAGGACA | 20 | 588 |
| CCR5-236 | − | UAGAUCAUGAAGAACCUUGA | 20 | 589 |
| CCR5-237 | − | GUCUAAGUCAUGAGCUGAGC | 20 | 590 |
| CCR5-238 | − | UCUAAGUCAUGAGCUGAGCA | 20 | 591 |
| CCR5-239 | − | UGAGCUGAGCAGGGAGAUCC | 20 | 592 |
| CCR5-240 | − | CUGAGCAGGGAGAUCCUGGU | 20 | 593 |
| CCR5-241 | − | AUCCUGGUUGGUGUUGCAGA | 20 | 594 |
| CCR5-242 | − | GUUGCAGAAGGUUUACUCUG | 20 | 595 |
| CCR5-243 | − | AAGGUUUACUCUGUGGCCAA | 20 | 596 |
| CCR5-244 | − | GUUUACUCUGUGGCCAAAGG | 20 | 597 |
| CCR5-245 | − | UUUACUCUGUGGCCAAAGGA | 20 | 598 |
| CCR5-246 | − | UCUGUGGCCAAAGGAGGGUC | 20 | 599 |
| CCR5-247 | − | UGGCCAAAGGAGGGUCAGGA | 20 | 600 |
| CCR5-248 | − | GUCAGGAAGGAUGAGCAUUU | 20 | 601 |
| CCR5-249 | − | UCAGGAAGGAUGAGCAUUUA | 20 | 602 |
| CCR5-250 | − | AAGGAUGAGCAUUUAGGGCA | 20 | 603 |
| CCR5-251 | − | GGAGACCACCAACAGCCCUC | 20 | 604 |
| CCR5-252 | − | CCACCAACAGCCCUCAGGUC | 20 | 605 |
| CCR5-253 | − | CACCAACAGCCCUCAGGUCA | 20 | 606 |
| CCR5-254 | − | ACAGCCCUCAGGUCAGGGUG | 20 | 607 |
| CCR5-255 | − | CCCUCAGGUCAGGGUGAGGA | 20 | 608 |
| CCR5-256 | − | GAUGGCCUCUGCUAAGCUCA | 20 | 609 |
| CCR5-257 | − | UCUGCUAAGCUCAAGGCGUG | 20 | 610 |
| CCR5-258 | − | CUAAGCUCAAGGCGUGAGGA | 20 | 611 |
| CCR5-259 | − | UAAGCUCAAGGCGUGAGGAU | 20 | 612 |
| CCR5-260 | − | CUCAAGGCGUGAGGAUGGGA | 20 | 613 |
| CCR5-261 | − | AAGGCGUGAGGAUGGGAAGG | 20 | 614 |
| CCR5-262 | − | AGGCGUGAGGAUGGGAAGGA | 20 | 615 |
| CCR5-263 | − | CGUGAGGAUGGGAAGGAGGG | 20 | 616 |
| CCR5-264 | − | GAAGGAGGGAGGUAUUCGUA | 20 | 617 |
| CCR5-265 | − | GAGGGAGGUAUUCGUAAGGA | 20 | 618 |
| CCR5-266 | − | AGGGAGGUAUUCGUAAGGAU | 20 | 619 |
| CCR5-267 | − | AGGUAUUCGUAAGGAUGGGA | 20 | 620 |
| CCR5-268 | − | UAUUCGUAAGGAUGGGAAGG | 20 | 621 |
| CCR5-269 | − | AUUCGUAAGGAUGGGAAGGA | 20 | 622 |
| CCR5-270 | − | CGUAAGGAUGGGAAGGAGGG | 20 | 623 |
| CCR5-271 | − | AGGUAUUCGUGCAGCAUAUG | 20 | 624 |
| CCR5-272 | − | GGAUGCAGAGUCAGCAGAAC | 20 | 625 |
| CCR5-273 | − | GAUGCAGAGUCAGCAGAACU | 20 | 626 |
| CCR5-274 | − | AUGCAGAGUCAGCAGAACUG | 20 | 627 |
| CCR5-275 | − | CAGAGUCAGCAGAACUGGGG | 20 | 628 |
| CCR5-276 | − | CAGCAGAACUGGGGUGGAUU | 20 | 629 |
| CCR5-277 | − | AGCAGAACUGGGGUGGAUUU | 20 | 630 |
| CCR5-278 | − | GAACUGGGGUGGAUUUGGGU | 20 | 631 |
| CCR5-279 | − | GUGGAUUUGGGUUGGAAGUG | 20 | 632 |
| CCR5-280 | − | UGGAUUUGGGUUGGAAGUGA | 20 | 633 |
| CCR5-281 | − | GUUGGAAGUGAGGGUCAGAG | 20 | 634 |
| CCR5-282 | − | UCCCUAGUCUUCAAGCAGAU | 20 | 635 |
| CCR5-283 | − | GAAAAGACAUCAAGCACAGA | 20 | 636 |
| CCR5-284 | − | AAGACAUCAAGCACAGAAGG | 20 | 637 |
| CCR5-285 | − | ACAUCAAGCACAGAAGGAGG | 20 | 638 |
| CCR5-286 | − | UCAAGCACAGAAGGAGGAGG | 20 | 639 |
| CCR5-287 | − | AGCACAGAAGGAGGAGGAGG | 20 | 640 |
| CCR5-288 | − | GAAGGAGGAGGAGGAGGUUU | 20 | 641 |
| CCR5-289 | − | GGUUUAGGUCAAGAAGAAGA | 20 | 642 |
| CCR5-290 | − | AGGUCAAGAAGAAGAUGGAU | 20 | 643 |
| CCR5-291 | − | AGAAGAUGGAUUGGUGUAAA | 20 | 644 |
| CCR5-292 | − | GAUGGAUUGGUGUAAAAGGA | 20 | 645 |
| CCR5-293 | − | AUGGAUUGGUGUAAAAGGAU | 20 | 646 |
| CCR5-294 | − | UUGGUGUAAAAGGAUGGGUC | 20 | 647 |
| CCR5-295 | − | CACAGUCUCACCCAGACUCC | 20 | 648 |
| CCR5-296 | − | CCAUCCCAGCUGAAAUACUG | 20 | 649 |
| CCR5-297 | − | CAUCCCAGCUGAAAUACUGA | 20 | 650 |
| CCR5-298 | − | AUCCCAGCUGAAAUACUGAG | 20 | 651 |
| CCR5-299 | − | UGAAAUACUGAGGGGUCUCC | 20 | 652 |
| CCR5-300 | − | AAUACUGAGGGGUCUCCAGG | 20 | 653 |
| CCR5-301 | − | ACUAGAUUUAUGAAUACACG | 20 | 654 |
| CCR5-302 | − | UUAUGAAUACACGAGGUAUG | 20 | 655 |
| CCR5-303 | − | AUACACGAGGUAUGAGGUCU | 20 | 656 |
| CCR5-304 | − | UCAGCUCACACAUGAGAUCU | 20 | 657 |
| CCR5-305 | − | UCACACAUGAGAUCUAGGUG | 20 | 658 |
| CCR5-306 | − | AUUACCUAGUAGUCAUUUCA | 20 | 659 |
| CCR5-307 | − | UUACCUAGUAGUCAUUUCAU | 20 | 660 |
| CCR5-308 | − | GUAGUCAUUUCAUGGGUUGU | 20 | 661 |
| CCR5-309 | − | UAGUCAUUUCAUGGGUUGUU | 20 | 662 |
| CCR5-310 | − | UCAUUUCAUGGGUUGUUGGG | 20 | 663 |
| CCR5-311 | − | GUUGUUGGGAGGAUUCUAUG | 20 | 664 |
| CCR5-312 | − | GGAUUCUAUGAGGCAACCAC | 20 | 665 |
| CCR5-313 | − | AAACUCUUAGUUACUCAUUC | 20 | 666 |
| CCR5-314 | − | AACUCUUAGUUACUCAUUCA | 20 | 667 |
| CCR5-315 | − | CUGAGCAAAGCAUUGAGCAA | 20 | 668 |
| CCR5-316 | − | UGAGCAAAGCAUUGAGCAAA | 20 | 669 |
| CCR5-317 | − | GAGCAAAGCAUUGAGCAAAG | 20 | 670 |
| CCR5-318 | − | UGAGCAAAGGGGUCCCAUAG | 20 | 671 |
| CCR5-319 | − | AAAGGGGUCCCAUAGAGGUG | 20 | 672 |
| CCR5-320 | − | AAGGGGUCCCAUAGAGGUGA | 20 | 673 |
| CCR5-321 | − | UGCCCAGUGCACACAAGUGU | 20 | 674 |
| CCR5-322 | − | UUCUGCAUUUAACCGUCAAU | 20 | 675 |
| CCR5-323 | − | AUUUAACCGUCAAUAGGCAA | 20 | 676 |
| CCR5-324 | − | UUUAACCGUCAAUAGGCAAA | 20 | 677 |
| CCR5-325 | − | UUAACCGUCAAUAGGCAAAG | 20 | 678 |
| CCR5-326 | − | UAACCGUCAAUAGGCAAAGG | 20 | 679 |
| CCR5-327 | − | AACCGUCAAUAGGCAAAGGG | 20 | 680 |
| CCR5-328 | − | GUCAAUAGGCAAAGGGGGGA | 20 | 681 |
| CCR5-329 | − | UCAAUAGGCAAAGGGGGGAA | 20 | 682 |
| CCR5-330 | − | GGGGAAGGGACAUAUUCAUU | 20 | 683 |
| CCR5-331 | − | CCUCCGUAUUUCAGACUGAA | 20 | 684 |
| CCR5-332 | − | CUCCGUAUUUCAGACUGAAU | 20 | 685 |
| CCR5-333 | − | UCCGUAUUUCAGACUGAAUG | 20 | 686 |
| CCR5-334 | − | CCGUAUUUCAGACUGAAUGG | 20 | 687 |
| CCR5-335 | − | UAUUUCAGACUGAAUGGGGG | 20 | 688 |
| CCR5-336 | − | AUUUCAGACUGAAUGGGGGU | 20 | 689 |
| CCR5-337 | − | UUUCAGACUGAAUGGGGGUG | 20 | 690 |
| CCR5-338 | − | UUCAGACUGAAUGGGGGUGG | 20 | 691 |
| CCR5-339 | − | UCAGACUGAAUGGGGGUGGG | 20 | 692 |
| CCR5-340 | − | CAGACUGAAUGGGGGUGGGG | 20 | 693 |
| CCR5-341 | − | AGACUGAAUGGGGGUGGGGG | 20 | 694 |
| CCR5-342 | − | GGGGGUGGGGGGGGCGCCUU | 20 | 695 |
| CCR5-343 | − | UGAAUAUACCCCUUAGUGUU | 20 | 696 |
| CCR5-344 | − | GAAUAUACCCCUUAGUGUUU | 20 | 697 |
| CCR5-345 | − | UUUGGGUAUAUUCAUUUCAA | 20 | 698 |
| CCR5-346 | − | UUGGGUAUAUUCAUUUCAAA | 20 | 699 |
| CCR5-347 | − | CAUUUCAAAGGGAGAGAGAG | 20 | 700 |
| CCR5-348 | − | ACUUGAGACUGUUUUGAAUU | 20 | 701 |
| CCR5-349 | − | CUUGAGACUGUUUUGAAUUU | 20 | 702 |
| CCR5-350 | − | UUGAGACUGUUUUGAAUUUG | 20 | 703 |
| CCR5-351 | − | UGAGACUGUUUUGAAUUUGG | 20 | 704 |
| CCR5-352 | − | ACUGUUUUGAAUUUGGGGGA | 20 | 705 |
| CCR5-353 | − | GGCUAAAACCAUCAUAGUAC | 20 | 706 |
| CCR5-354 | − | AAACCAUCAUAGUACAGGUA | 20 | 707 |
| CCR5-355 | − | AUCAUAGUACAGGUAAGGUG | 20 | 708 |
| CCR5-356 | − | UCAUAGUACAGGUAAGGUGA | 20 | 709 |
| CCR5-357 | − | UAAGGUGAGGGAAUAGUAAG | 20 | 710 |
| CCR5-358 | − | GUAAGUGGUGAGAACUACUC | 20 | 711 |
| CCR5-359 | − | UAAGUGGUGAGAACUACUCA | 20 | 712 |
| CCR5-360 | − | GAGAACUACUCAGGGAAUGA | 20 | 713 |
| CCR5-361 | − | GAAGGUGUCAGAAUAAUAAG | 20 | 714 |
| CCR5-362 | − | UCUCAGCCUCUGAAUAUGAA | 20 | 715 |
| CCR5-363 | − | AAUAUGAACGGUGAGCAUUG | 20 | 716 |
| CCR5-364 | − | UGAGCAUUGUGGCUGUCAGC | 20 | 717 |
| CCR5-365 | − | CUGUCAGCAGGAAGCAACGA | 20 | 718 |
| CCR5-366 | − | UGUCAGCAGGAAGCAACGAA | 20 | 719 |
| CCR5-367 | − | UUCCUUUUGCUCUUAAGUUG | 20 | 720 |
| CCR5-368 | − | GGAGAGUGCAACAGUAGCAU | 20 | 721 |
| CCR5-369 | − | UAGCAUAGGACCCUACCCUC | 20 | 722 |
| CCR5-370 | − | AGCAUAGGACCCUACCCUCU | 20 | 723 |
| CCR5-371 | − | ACAGUCAGUAUCAAUUC | 17 | 724 |
| CCR5-372 | − | AUUAAAGAUAGUCAUCU | 17 | 725 |
| CCR5-373 | − | UUAAAGAUAGUCAUCUU | 17 | 726 |
| CCR5-374 | − | UAAAGAUAGUCAUCUUG | 17 | 727 |
| CCR5-375 | − | GAUAGUCAUCUUGGGGC | 17 | 728 |
| CCR5-376 | − | CCUGCCGCUGCUUGUCA | 17 | 729 |
| CCR5-377 | − | CAUGGUCAUCUGCUACU | 17 | 730 |
| CCR5-378 | − | AUGGUCAUCUGCUACUC | 17 | 731 |
| CCR5-379 | − | UCCUAAAAACUCUGCUU | 17 | 732 |
| CCR5-380 | − | GUCGAAAUGAGAAGAAG | 17 | 733 |
| CCR5-381 | − | AUGAGAAGAAGAGGCAC | 17 | 734 |
| CCR5-382 | − | UGAGAAGAAGAGGCACA | 17 | 735 |
| CCR5-383 | − | AGAGGCACAGGGCUGUG | 17 | 736 |
| CCR5-384 | − | UUGUUUAUUUUCUCUUC | 17 | 737 |
| CCR5-385 | − | UGUUUAUUUUCUCUUCU | 17 | 738 |
| CCR5-386 | − | UCUCCUGAACACCUUCC | 17 | 739 |
| CCR5-387 | − | ACCUUCCAGGAAUUCUU | 17 | 740 |
| CCR5-388 | − | AUUGCAGUAGCUCUAAC | 17 | 741 |
| CCR5-389 | − | CAGUAGCUCUAACAGGU | 17 | 742 |
| CCR5-390 | − | GUUGGACCAAGCUAUGC | 17 | 743 |
| CCR5-391 | − | CAGGUGACAGAGACUCU | 17 | 744 |
| CCR5-392 | − | AGGUGACAGAGACUCUU | 17 | 745 |
| CCR5-393 | − | AUCAUCUAUGCCUUUGU | 17 | 746 |
| CCR5-394 | − | UCAUCUAUGCCUUUGUC | 17 | 747 |
| CCR5-395 | − | CAUCUAUGCCUUUGUCG | 17 | 748 |
| CCR5-396 | − | UUCUAUUUUCCAGCAAG | 17 | 749 |
| CCR5-397 | − | GUUUACACCCGAUCCAC | 17 | 750 |
| CCR5-398 | − | UUUACACCCGAUCCACU | 17 | 751 |
| CCR5-399 | − | UUACACCCGAUCCACUG | 17 | 752 |
| CCR5-400 | − | CCGAUCCACUGGGGAGC | 17 | 753 |
| CCR5-401 | − | GGAGCAGGAAAUAUCUG | 17 | 754 |
| CCR5-402 | − | GAGCAGGAAAUAUCUGU | 17 | 755 |
| CCR5-403 | − | UCUGUGGGCUUGUGACA | 17 | 756 |
| CCR5-404 | − | UGUGACACGGACUCAAG | 17 | 757 |
| CCR5-405 | − | GUGACACGGACUCAAGU | 17 | 758 |
| CCR5-406 | − | CACGGACUCAAGUGGGC | 17 | 759 |
| CCR5-407 | − | AGUCAGAGUUGUGCACA | 17 | 760 |
| CCR5-408 | − | AGUUUUCAUACACAGCC | 17 | 761 |
| CCR5-409 | − | GUUUUCAUACACAGCCU | 17 | 762 |
| CCR5-410 | − | UCAUACACAGCCUGGGC | 17 | 763 |
| CCR5-411 | − | CAUACACAGCCUGGGCU | 17 | 764 |
| CCR5-412 | − | AUACACAGCCUGGGCUG | 17 | 765 |
| CCR5-413 | − | UACACAGCCUGGGCUGG | 17 | 766 |
| CCR5-414 | − | ACAGCCUGGGCUGGGGG | 17 | 767 |
| CCR5-415 | − | CAGCCUGGGCUGGGGGU | 17 | 768 |
| CCR5-416 | − | AGCCUGGGCUGGGGGUG | 17 | 769 |
| CCR5-417 | − | CUGGGCUGGGGGUGGGG | 17 | 770 |
| CCR5-418 | − | UGGGCUGGGGGUGGGGU | 17 | 771 |
| CCR5-419 | − | UGGGGGUGGGGUGGGAG | 17 | 772 |
| CCR5-420 | − | GAGAGGUCUUUUUUAAA | 17 | 773 |
| CCR5-421 | − | GGAAGUUACUGUUAUAG | 17 | 774 |
| CCR5-422 | − | GAAGUUACUGUUAUAGA | 17 | 775 |
| CCR5-423 | − | AGAUUCAUCCAUUUAUU | 17 | 776 |
| CCR5-424 | − | ACUUUUUACCUAGUACA | 17 | 777 |
| CCR5-425 | − | AGUACAAGGCAACAUAU | 17 | 778 |
| CCR5-426 | − | GUAAAUGUGUUUAAAAC | 17 | 779 |
| CCR5-427 | − | AGGUCUUUGUCUUGCUA | 17 | 780 |
| CCR5-428 | − | GGUCUUUGUCUUGCUAU | 17 | 781 |
| CCR5-429 | − | GUCUUUGUCUUGCUAUG | 17 | 782 |
| CCR5-430 | − | GUGUGAUUUCCCCUCCA | 17 | 783 |
| CCR5-431 | − | AUUUCCCCUCCAAGGUA | 17 | 784 |
| CCR5-432 | − | UUCACUGACUUAGAACC | 17 | 785 |
| CCR5-433 | − | ACCAGGCGAGAGACUUG | 17 | 786 |
| CCR5-434 | − | GCGAGAGACUUGUGGCC | 17 | 787 |
| CCR5-435 | − | CGAGAGACUUGUGGCCU | 17 | 788 |
| CCR5-436 | − | UUGUGGCCUGGGAGAGC | 17 | 789 |
| CCR5-437 | − | UGUGGCCUGGGAGAGCU | 17 | 790 |
| CCR5-438 | − | GUGGCCUGGGAGAGCUG | 17 | 791 |
| CCR5-439 | − | AAGCUUCUUAAAUGAGA | 17 | 792 |
| CCR5-440 | − | UGAGAAGGAAUUUGAGU | 17 | 793 |
| CCR5-441 | − | GUUGGAUCAUCUAUUGC | 17 | 794 |
| CCR5-442 | − | UCACUGCAAGCACUGCA | 17 | 795 |
| CCR5-443 | − | CACUGCAAGCACUGCAU | 17 | 796 |
| CCR5-444 | − | CACUGCAUGGGCAAGCU | 17 | 797 |
| CCR5-445 | − | GCAAGCUUGGCUGUAGA | 17 | 798 |
| CCR5-446 | − | GUAGAAGGAGACAGAGC | 17 | 799 |
| CCR5-447 | − | AAGGAGACAGAGCUGGU | 17 | 800 |
| CCR5-448 | − | AGGAGACAGAGCUGGUU | 17 | 801 |
| CCR5-449 | − | AGCUGGUUGGGAAGACA | 17 | 802 |
| CCR5-450 | − | GCUGGUUGGGAAGACAU | 17 | 803 |
| CCR5-451 | − | CUGGUUGGGAAGACAUG | 17 | 804 |
| CCR5-452 | − | GUUGGGAAGACAUGGGG | 17 | 805 |
| CCR5-453 | − | GGAAGACAUGGGGAGGA | 17 | 806 |
| CCR5-454 | − | CAUGGGGAGGAAGGACA | 17 | 807 |
| CCR5-455 | − | AUCAUGAAGAACCUUGA | 17 | 808 |
| CCR5-456 | − | UAAGUCAUGAGCUGAGC | 17 | 809 |
| CCR5-457 | − | AAGUCAUGAGCUGAGCA | 17 | 810 |
| CCR5-458 | − | GCUGAGCAGGGAGAUCC | 17 | 811 |
| CCR5-459 | − | AGCAGGGAGAUCCUGGU | 17 | 812 |
| CCR5-460 | − | CUGGUUGGUGUUGCAGA | 17 | 813 |
| CCR5-461 | − | GCAGAAGGUUUACUCUG | 17 | 814 |
| CCR5-462 | − | GUUUACUCUGUGGCCAA | 17 | 815 |
| CCR5-463 | − | UACUCUGUGGCCAAAGG | 17 | 816 |
| CCR5-464 | − | ACUCUGUGGCCAAAGGA | 17 | 817 |
| CCR5-465 | − | GUGGCCAAAGGAGGGUC | 17 | 818 |
| CCR5-466 | − | CCAAAGGAGGGUCAGGA | 17 | 819 |
| CCR5-467 | − | AGGAAGGAUGAGCAUUU | 17 | 820 |
| CCR5-468 | − | GGAAGGAUGAGCAUUUA | 17 | 821 |
| CCR5-469 | − | GAUGAGCAUUUAGGGCA | 17 | 822 |
| CCR5-470 | − | GACCACCAACAGCCCUC | 17 | 823 |
| CCR5-471 | − | CCAACAGCCCUCAGGUC | 17 | 824 |
| CCR5-472 | − | CAACAGCCCUCAGGUCA | 17 | 825 |
| CCR5-473 | − | GCCCUCAGGUCAGGGUG | 17 | 826 |
| CCR5-474 | − | UCAGGUCAGGGUGAGGA | 17 | 827 |
| CCR5-475 | − | GGCCUCUGCUAAGCUCA | 17 | 828 |
| CCR5-476 | − | GCUAAGCUCAAGGCGUG | 17 | 829 |
| CCR5-477 | − | AGCUCAAGGCGUGAGGA | 17 | 830 |
| CCR5-478 | − | GCUCAAGGCGUGAGGAU | 17 | 831 |
| CCR5-479 | − | AAGGCGUGAGGAUGGGA | 17 | 832 |
| CCR5-480 | − | GCGUGAGGAUGGGAAGG | 17 | 833 |
| CCR5-481 | − | CGUGAGGAUGGGAAGGA | 17 | 834 |
| CCR5-482 | − | GAGGAUGGGAAGGAGGG | 17 | 835 |
| CCR5-483 | − | GGAGGGAGGUAUUCGUA | 17 | 836 |
| CCR5-484 | − | GGAGGUAUUCGUAAGGA | 17 | 837 |
| CCR5-485 | − | GAGGUAUUCGUAAGGAU | 17 | 838 |
| CCR5-486 | − | UAUUCGUAAGGAUGGGA | 17 | 839 |
| CCR5-487 | − | UCGUAAGGAUGGGAAGG | 17 | 840 |
| CCR5-488 | − | CGUAAGGAUGGGAAGGA | 17 | 841 |
| CCR5-489 | − | AAGGAUGGGAAGGAGGG | 17 | 842 |
| CCR5-490 | − | UAUUCGUGCAGCAUAUG | 17 | 843 |
| CCR5-491 | − | UGCAGAGUCAGCAGAAC | 17 | 844 |
| CCR5-492 | − | GCAGAGUCAGCAGAACU | 17 | 845 |
| CCR5-493 | − | CAGAGUCAGCAGAACUG | 17 | 846 |
| CCR5-494 | − | AGUCAGCAGAACUGGGG | 17 | 847 |
| CCR5-495 | − | CAGAACUGGGGUGGAUU | 17 | 848 |
| CCR5-496 | − | AGAACUGGGGUGGAUUU | 17 | 849 |
| CCR5-497 | − | CUGGGGUGGAUUUGGGU | 17 | 850 |
| CCR5-498 | − | GAUUUGGGUUGGAAGUG | 17 | 851 |
| CCR5-499 | − | AUUUGGGUUGGAAGUGA | 17 | 852 |
| CCR5-500 | − | GGAAGUGAGGGUCAGAG | 17 | 853 |
| CCR5-501 | − | CUAGUCUUCAAGCAGAU | 17 | 854 |
| CCR5-502 | − | AAGACAUCAAGCACAGA | 17 | 855 |
| CCR5-503 | − | ACAUCAAGCACAGAAGG | 17 | 856 |
| CCR5-504 | − | UCAAGCACAGAAGGAGG | 17 | 857 |
| CCR5-505 | − | AGCACAGAAGGAGGAGG | 17 | 858 |
| CCR5-506 | − | ACAGAAGGAGGAGGAGG | 17 | 859 |
| CCR5-507 | − | GGAGGAGGAGGAGGUUU | 17 | 860 |
| CCR5-508 | − | UUAGGUCAAGAAGAAGA | 17 | 861 |
| CCR5-509 | − | UCAAGAAGAAGAUGGAU | 17 | 862 |
| CCR5-510 | − | AGAUGGAUUGGUGUAAA | 17 | 863 |
| CCR5-511 | − | GGAUUGGUGUAAAAGGA | 17 | 864 |
| CCR5-512 | − | GAUUGGUGUAAAAGGAU | 17 | 865 |
| CCR5-513 | − | GUGUAAAAGGAUGGGUC | 17 | 866 |
| CCR5-514 | − | AGUCUCACCCAGACUCC | 17 | 867 |
| CCR5-515 | − | UCCCAGCUGAAAUACUG | 17 | 868 |
| CCR5-516 | − | CCCAGCUGAAAUACUGA | 17 | 869 |
| CCR5-517 | − | CCAGCUGAAAUACUGAG | 17 | 870 |
| CCR5-518 | − | AAUACUGAGGGGUCUCC | 17 | 871 |
| CCR5-519 | − | ACUGAGGGGUCUCCAGG | 17 | 872 |
| CCR5-520 | − | AGAUUUAUGAAUACACG | 17 | 873 |
| CCR5-521 | − | UGAAUACACGAGGUAUG | 17 | 874 |
| CCR5-522 | − | CACGAGGUAUGAGGUCU | 17 | 875 |
| CCR5-523 | − | GCUCACACAUGAGAUCU | 17 | 876 |
| CCR5-524 | − | CACAUGAGAUCUAGGUG | 17 | 877 |
| CCR5-525 | − | ACCUAGUAGUCAUUUCA | 17 | 878 |
| CCR5-526 | − | CCUAGUAGUCAUUUCAU | 17 | 879 |
| CCR5-527 | − | GUCAUUUCAUGGGUUGU | 17 | 880 |
| CCR5-528 | − | UCAUUUCAUGGGUUGUU | 17 | 881 |
| CCR5-529 | − | UUUCAUGGGUUGUUGGG | 17 | 882 |
| CCR5-530 | − | GUUGGGAGGAUUCUAUG | 17 | 883 |
| CCR5-531 | − | UUCUAUGAGGCAACCAC | 17 | 884 |
| CCR5-532 | − | CUCUUAGUUACUCAUUC | 17 | 885 |
| CCR5-533 | − | UCUUAGUUACUCAUUCA | 17 | 886 |
| CCR5-534 | − | AGCAAAGCAUUGAGCAA | 17 | 887 |
| CCR5-535 | − | GCAAAGCAUUGAGCAAA | 17 | 888 |
| CCR5-536 | − | CAAAGCAUUGAGCAAAG | 17 | 889 |
| CCR5-537 | − | GCAAAGGGGUCCCAUAG | 17 | 890 |
| CCR5-538 | − | GGGGUCCCAUAGAGGUG | 17 | 891 |
| CCR5-539 | − | GGGUCCCAUAGAGGUGA | 17 | 892 |
| CCR5-540 | − | CCAGUGCACACAAGUGU | 17 | 893 |
| CCR5-541 | − | UGCAUUUAACCGUCAAU | 17 | 894 |
| CCR5-542 | − | UAACCGUCAAUAGGCAA | 17 | 895 |
| CCR5-543 | − | AACCGUCAAUAGGCAAA | 17 | 896 |
| CCR5-544 | − | ACCGUCAAUAGGCAAAG | 17 | 897 |
| CCR5-545 | − | CCGUCAAUAGGCAAAGG | 17 | 898 |
| CCR5-546 | − | CGUCAAUAGGCAAAGGG | 17 | 899 |
| CCR5-547 | − | AAUAGGCAAAGGGGGGA | 17 | 900 |
| CCR5-548 | − | AUAGGCAAAGGGGGGAA | 17 | 901 |
| CCR5-549 | − | GAAGGGACAUAUUCAUU | 17 | 902 |
| CCR5-550 | − | CCGUAUUUCAGACUGAA | 17 | 903 |
| CCR5-551 | − | CGUAUUUCAGACUGAAU | 17 | 904 |
| CCR5-552 | − | GUAUUUCAGACUGAAUG | 17 | 905 |
| CCR5-553 | − | UAUUUCAGACUGAAUGG | 17 | 906 |
| CCR5-554 | − | UUCAGACUGAAUGGGGG | 17 | 907 |
| CCR5-555 | − | UCAGACUGAAUGGGGGU | 17 | 908 |
| CCR5-556 | − | CAGACUGAAUGGGGGUG | 17 | 909 |
| CCR5-557 | − | AGACUGAAUGGGGGUGG | 17 | 910 |
| CCR5-558 | − | GACUGAAUGGGGGUGGG | 17 | 911 |
| CCR5-559 | − | ACUGAAUGGGGGUGGGG | 17 | 912 |
| CCR5-560 | − | CUGAAUGGGGGUGGGGG | 17 | 913 |
| CCR5-561 | − | GGUGGGGGGGGCGCCUU | 17 | 914 |
| CCR5-562 | − | AUAUACCCCUUAGUGUU | 17 | 915 |
| CCR5-563 | − | UAUACCCCUUAGUGUUU | 17 | 916 |
| CCR5-564 | − | GGGUAUAUUCAUUUCAA | 17 | 917 |
| CCR5-565 | − | GGUAUAUUCAUUUCAAA | 17 | 918 |
| CCR5-566 | − | UUCAAAGGGAGAGAGAG | 17 | 919 |
| CCR5-567 | − | UGAGACUGUUUUGAAUU | 17 | 920 |
| CCR5-568 | − | GAGACUGUUUUGAAUUU | 17 | 921 |
| CCR5-569 | − | AGACUGUUUUGAAUUUG | 17 | 922 |
| CCR5-570 | − | GACUGUUUUGAAUUUGG | 17 | 923 |
| CCR5-571 | − | GUUUUGAAUUUGGGGGA | 17 | 924 |
| CCR5-572 | − | UAAAACCAUCAUAGUAC | 17 | 925 |
| CCR5-573 | − | CCAUCAUAGUACAGGUA | 17 | 926 |
| CCR5-574 | − | AUAGUACAGGUAAGGUG | 17 | 927 |
| CCR5-575 | − | UAGUACAGGUAAGGUGA | 17 | 928 |
| CCR5-576 | − | GGUGAGGGAAUAGUAAG | 17 | 929 |
| CCR5-577 | − | AGUGGUGAGAACUACUC | 17 | 930 |
| CCR5-578 | − | GUGGUGAGAACUACUCA | 17 | 931 |
| CCR5-579 | − | AACUACUCAGGGAAUGA | 17 | 932 |
| CCR5-580 | − | GGUGUCAGAAUAAUAAG | 17 | 933 |
| CCR5-581 | − | CAGCCUCUGAAUAUGAA | 17 | 934 |
| CCR5-582 | − | AUGAACGGUGAGCAUUG | 17 | 935 |
| CCR5-583 | − | GCAUUGUGGCUGUCAGC | 17 | 936 |
| CCR5-584 | − | UCAGCAGGAAGCAACGA | 17 | 937 |
| CCR5-585 | − | CAGCAGGAAGCAACGAA | 17 | 938 |
| CCR5-586 | − | CUUUUGCUCUUAAGUUG | 17 | 939 |
| CCR5-587 | − | GAGUGCAACAGUAGCAU | 17 | 940 |
| CCR5-588 | − | CAUAGGACCCUACCCUC | 17 | 941 |
| CCR5-589 | − | AUAGGACCCUACCCUCU | 17 | 942 |
| CCR5-590 | + | AUGUCAGAAUGUCUUUGACU | 20 | 943 |
| CCR5-591 | + | AUGUCUUUGACUUGGCCCAG | 20 | 944 |
| CCR5-592 | + | UGUCUUUGACUUGGCCCAGA | 20 | 945 |
| CCR5-593 | + | UUUGACUUGGCCCAGAGGGU | 20 | 946 |
| CCR5-594 | + | UUGACUUGGCCCAGAGGGUA | 20 | 947 |
| CCR5-595 | + | CUCCACAACUUAAGAGCAAA | 20 | 948 |
| CCR5-596 | + | UGCUCACCGUUCAUAUUCAG | 20 | 949 |
| CCR5-597 | + | UCACCUUACCUGUACUAUGA | 20 | 950 |
| CCR5-598 | + | AUGAAUAUACCCAAACACUA | 20 | 951 |
| CCR5-599 | + | UGAAUAUACCCAAACACUAA | 20 | 952 |
| CCR5-600 | + | GAAUAUACCCAAACACUAAG | 20 | 953 |
| CCR5-601 | + | AAGGGGUAUAUUCAUUUCAA | 20 | 954 |
| CCR5-602 | + | AGGGGUAUAUUCAUUUCAAA | 20 | 955 |
| CCR5-603 | + | GGUAUAUUCAUUUCAAAGGG | 20 | 956 |
| CCR5-604 | + | GUAUAUUCAUUUCAAAGGGA | 20 | 957 |
| CCR5-605 | + | ACGAUUUUUUCUGUUGCUUC | 20 | 958 |
| CCR5-606 | + | UCUGUUGCUUCUGGUUUGUC | 20 | 959 |
| CCR5-607 | + | GCUUCUGGUUUGUCUGGAGA | 20 | 960 |
| CCR5-608 | + | GUUUGUCUGGAGAAGGCAUC | 20 | 961 |
| CCR5-609 | + | GCAUCUGGAAUAAGUACCUA | 20 | 962 |
| CCR5-610 | + | CCCCCAUUCAGUCUGAAAUA | 20 | 963 |
| CCR5-611 | + | CCAUUCAGUCUGAAAUACGG | 20 | 964 |
| CCR5-612 | + | UCAGUCUGAAAUACGGAGGC | 20 | 965 |
| CCR5-613 | + | GCUGGUAAAUUGUACUUUUG | 20 | 966 |
| CCR5-614 | + | CUGGUAAAUUGUACUUUUGU | 20 | 967 |
| CCR5-615 | + | UUGUACUUUUGUGGGUUUUA | 20 | 968 |
| CCR5-616 | + | UUUGUGGGUUUUAAGGCUCA | 20 | 969 |
| CCR5-617 | + | UUCCCCCCUUUGCCUAUUGA | 20 | 970 |
| CCR5-618 | + | AUACCUACACUUGUGUGCAC | 20 | 971 |
| CCR5-619 | + | UACCUACACUUGUGUGCACU | 20 | 972 |
| CCR5-620 | + | UACACUUGUGUGCACUGGGC | 20 | 973 |
| CCR5-621 | + | AGGCAGCAUCUUAGUUUUUC | 20 | 974 |
| CCR5-622 | + | UCAGGCUUCCCUCACCUCUA | 20 | 975 |
| CCR5-623 | + | CAGGCUUCCCUCACCUCUAU | 20 | 976 |
| CCR5-624 | + | UAUGUGCUAAAUGCUGCCUG | 20 | 977 |
| CCR5-625 | + | CAACCCAUGAAAUGACUACU | 20 | 978 |
| CCR5-626 | + | UCAUAAAUCUAGUCUCCUCC | 20 | 979 |
| CCR5-627 | + | AGACCCCUCAGUAUUUCAGC | 20 | 980 |
| CCR5-628 | + | GACCCCUCAGUAUUUCAGCU | 20 | 981 |
| CCR5-629 | + | CCUCAGUAUUUCAGCUGGGA | 20 | 982 |
| CCR5-630 | + | CUCAGUAUUUCAGCUGGGAU | 20 | 983 |
| CCR5-631 | + | GUAUUUCAGCUGGGAUGGGA | 20 | 984 |
| CCR5-632 | + | GCAUUCAGUGAAAGACAGCC | 20 | 985 |
| CCR5-633 | + | GUGAAAGACAGCCUGGAGUC | 20 | 986 |
| CCR5-634 | + | UGAAAGACAGCCUGGAGUCU | 20 | 987 |
| CCR5-635 | + | CUGUGCUUGAUGUCUUUUCA | 20 | 988 |
| CCR5-636 | + | UGUGCUUGAUGUCUUUUCAA | 20 | 989 |
| CCR5-637 | + | CUCCAAUCUGCUUGAAGACU | 20 | 990 |
| CCR5-638 | + | UCCAAUCUGCUUGAAGACUA | 20 | 991 |
| CCR5-639 | + | UCACGCCUUGAGCUUAGCAG | 20 | 992 |
| CCR5-640 | + | GCCAUCCUCACCCUGACCUG | 20 | 993 |
| CCR5-641 | + | CCAUCCUCACCCUGACCUGA | 20 | 994 |
| CCR5-642 | + | CACCCUGACCUGAGGGCUGU | 20 | 995 |
| CCR5-643 | + | CCUGACCUGAGGGCUGUUGG | 20 | 996 |
| CCR5-644 | + | CAUCCUUCCUGACCCUCCUU | 20 | 997 |
| CCR5-645 | + | AACCUUCUGCAACACCAACC | 20 | 998 |
| CCR5-646 | + | UGCUCAGCUCAUGACUUAGA | 20 | 999 |
| CCR5-647 | + | UAGACGGAGCAAUGCCGUCA | 20 | 1000 |
| CCR5-648 | + | CCCAUGCAGUGCUUGCAGUG | 20 | 1001 |
| CCR5-649 | + | GAAGCUUCCCCAGCUCUCCC | 20 | 1002 |
| CCR5-650 | + | CAGGCCACAAGUCUCUCGCC | 20 | 1003 |
| CCR5-651 | + | GAAACUUAUUAACCAUACCU | 20 | 1004 |
| CCR5-652 | + | ACUUAUUAACCAUACCUUGG | 20 | 1005 |
| CCR5-653 | + | CUUAUUAACCAUACCUUGGA | 20 | 1006 |
| CCR5-654 | + | UUAUUAACCAUACCUUGGAG | 20 | 1007 |
| CCR5-655 | + | CCUAUAUGUUGCCUUGUACU | 20 | 1008 |
| CCR5-656 | + | GUACAUUUCUGAAAUAAUUU | 20 | 1009 |
| CCR5-657 | + | CAAGAAUCAGCAAUUCUCUG | 20 | 1010 |
| CCR5-658 | + | CUUUCUUUUAAAUAUACAUA | 20 | 1011 |
| CCR5-659 | + | AAAUAUACAUAAGGAACUUU | 20 | 1012 |
| CCR5-660 | + | AUAAGGAACUUUCGGAGUGA | 20 | 1013 |
| CCR5-661 | + | UAAGGAACUUUCGGAGUGAA | 20 | 1014 |
| CCR5-662 | + | CAAUAACUUGAUGCAUGUGA | 20 | 1015 |
| CCR5-663 | + | AAUAACUUGAUGCAUGUGAA | 20 | 1016 |
| CCR5-664 | + | AUAACUUGAUGCAUGUGAAG | 20 | 1017 |
| CCR5-665 | + | CAUGUGAAGGGGAGAUAAAA | 20 | 1018 |
| CCR5-666 | + | UUCAUCAACAUAUUUUGAUU | 20 | 1019 |
| CCR5-667 | + | AUUUGGCUUUCUAUAAUUGA | 20 | 1020 |
| CCR5-668 | + | UUUGGCUUUCUAUAAUUGAU | 20 | 1021 |
| CCR5-669 | + | UUAAACAGAUGCCAAAUAAA | 20 | 1022 |
| CCR5-670 | + | UCCCACCCCACCCCCAGCCC | 20 | 1023 |
| CCR5-671 | + | GCCAUGUGCACAACUCUGAC | 20 | 1024 |
| CCR5-672 | + | CCAUGUGCACAACUCUGACU | 20 | 1025 |
| CCR5-673 | + | AGAUAUUUCCUGCUCCCCAG | 20 | 1026 |
| CCR5-674 | + | UUUCCUGCUCCCCAGUGGAU | 20 | 1027 |
| CCR5-675 | + | UUCCUGCUCCCCAGUGGAUC | 20 | 1028 |
| CCR5-676 | + | GUAAACUGAGCUUGCUCGCU | 20 | 1029 |
| CCR5-677 | + | UAAACUGAGCUUGCUCGCUC | 20 | 1030 |
| CCR5-678 | + | CUCGCUCGGGAGCCUCUUGC | 20 | 1031 |
| CCR5-679 | + | ACAGCAUUUGCAGAAGCGUU | 20 | 1032 |
| CCR5-680 | + | AGCGUUUGGCAAUGUGCUUU | 20 | 1033 |
| CCR5-681 | + | GCUUUUGGAAGAAGACUAAG | 20 | 1034 |
| CCR5-682 | + | UCUGAACUUCUCCCCGACAA | 20 | 1035 |
| CCR5-683 | + | CCCGACAAAGGCAUAGAUGA | 20 | 1036 |
| CCR5-684 | + | CCGACAAAGGCAUAGAUGAU | 20 | 1037 |
| CCR5-685 | + | CGACAAAGGCAUAGAUGAUG | 20 | 1038 |
| CCR5-686 | + | UCUCUGUCACCUGCAUAGCU | 20 | 1039 |
| CCR5-687 | + | UAGAGCUACUGCAAUUAUUC | 20 | 1040 |
| CCR5-688 | + | UAUUCAGGCCAAAGAAUUCC | 20 | 1041 |
| CCR5-689 | + | CAGGCCAAAGAAUUCCUGGA | 20 | 1042 |
| CCR5-690 | + | AGAAUUCCUGGAAGGUGUUC | 20 | 1043 |
| CCR5-691 | + | CCUGGAAGGUGUUCAGGAGA | 20 | 1044 |
| CCR5-692 | + | CAGGAGAAGGACAAUGUUGU | 20 | 1045 |
| CCR5-693 | + | AGGAGAAGGACAAUGUUGUA | 20 | 1046 |
| CCR5-694 | + | GAGAAAAUAAACAAUCAUGA | 20 | 1047 |
| CCR5-695 | + | GACACCGAAGCAGAGUUUUU | 20 | 1048 |
| CCR5-696 | + | CAGAUGACCAUGACAAGCAG | 20 | 1049 |
| CCR5-697 | + | UGACCAUGACAAGCAGCGGC | 20 | 1050 |
| CCR5-698 | + | AGAUGACUAUCUUUAAUGUC | 20 | 1051 |
| CCR5-699 | + | CAGAAUUGAUACUGACUGUA | 20 | 1052 |
| CCR5-700 | + | GUAUGGAAAAUGAGAGCUGC | 20 | 1053 |
| CCR5-701 | + | UCAGAAUGUCUUUGACU | 17 | 1054 |
| CCR5-702 | + | UCUUUGACUUGGCCCAG | 17 | 1055 |
| CCR5-703 | + | CUUUGACUUGGCCCAGA | 17 | 1056 |
| CCR5-704 | + | GACUUGGCCCAGAGGGU | 17 | 1057 |
| CCR5-705 | + | ACUUGGCCCAGAGGGUA | 17 | 1058 |
| CCR5-706 | + | CACAACUUAAGAGCAAA | 17 | 1059 |
| CCR5-707 | + | UCACCGUUCAUAUUCAG | 17 | 1060 |
| CCR5-708 | + | CCUUACCUGUACUAUGA | 17 | 1061 |
| CCR5-709 | + | AAUAUACCCAAACACUA | 17 | 1062 |
| CCR5-710 | + | AUAUACCCAAACACUAA | 17 | 1063 |
| CCR5-711 | + | UAUACCCAAACACUAAG | 17 | 1064 |
| CCR5-712 | + | GGGUAUAUUCAUUUCAA | 17 | 1065 |
| CCR5-713 | + | GGUAUAUUCAUUUCAAA | 17 | 1066 |
| CCR5-714 | + | AUAUUCAUUUCAAAGGG | 17 | 1067 |
| CCR5-715 | + | UAUUCAUUUCAAAGGGA | 17 | 1068 |
| CCR5-716 | + | AUUUUUUCUGUUGCUUC | 17 | 1069 |
| CCR5-717 | + | GUUGCUUCUGGUUUGUC | 17 | 1070 |
| CCR5-718 | + | UCUGGUUUGUCUGGAGA | 17 | 1071 |
| CCR5-719 | + | UGUCUGGAGAAGGCAUC | 17 | 1072 |
| CCR5-720 | + | UCUGGAAUAAGUACCUA | 17 | 1073 |
| CCR5-721 | + | CCAUUCAGUCUGAAAUA | 17 | 1074 |
| CCR5-722 | + | UUCAGUCUGAAAUACGG | 17 | 1075 |
| CCR5-723 | + | GUCUGAAAUACGGAGGC | 17 | 1076 |
| CCR5-724 | + | GGUAAAUUGUACUUUUG | 17 | 1077 |
| CCR5-725 | + | GUAAAUUGUACUUUUGU | 17 | 1078 |
| CCR5-726 | + | UACUUUUGUGGGUUUUA | 17 | 1079 |
| CCR5-727 | + | GUGGGUUUUAAGGCUCA | 17 | 1080 |
| CCR5-728 | + | CCCCCUUUGCCUAUUGA | 17 | 1081 |
| CCR5-729 | + | CCUACACUUGUGUGCAC | 17 | 1082 |
| CCR5-730 | + | CUACACUUGUGUGCACU | 17 | 1083 |
| CCR5-731 | + | ACUUGUGUGCACUGGGC | 17 | 1084 |
| CCR5-732 | + | CAGCAUCUUAGUUUUUC | 17 | 1085 |
| CCR5-733 | + | GGCUUCCCUCACCUCUA | 17 | 1086 |
| CCR5-734 | + | GCUUCCCUCACCUCUAU | 17 | 1087 |
| CCR5-735 | + | GUGCUAAAUGCUGCCUG | 17 | 1088 |
| CCR5-736 | + | CCCAUGAAAUGACUACU | 17 | 1089 |
| CCR5-737 | + | UAAAUCUAGUCUCCUCC | 17 | 1090 |
| CCR5-738 | + | CCCCUCAGUAUUUCAGC | 17 | 1091 |
| CCR5-739 | + | CCCUCAGUAUUUCAGCU | 17 | 1092 |
| CCR5-740 | + | CAGUAUUUCAGCUGGGA | 17 | 1093 |
| CCR5-741 | + | AGUAUUUCAGCUGGGAU | 17 | 1094 |
| CCR5-742 | + | UUUCAGCUGGGAUGGGA | 17 | 1095 |
| CCR5-743 | + | UUCAGUGAAAGACAGCC | 17 | 1096 |
| CCR5-744 | + | AAAGACAGCCUGGAGUC | 17 | 1097 |
| CCR5-745 | + | AAGACAGCCUGGAGUCU | 17 | 1098 |
| CCR5-746 | + | UGCUUGAUGUCUUUUCA | 17 | 1099 |
| CCR5-747 | + | GCUUGAUGUCUUUUCAA | 17 | 1100 |
| CCR5-748 | + | CAAUCUGCUUGAAGACU | 17 | 1101 |
| CCR5-749 | + | AAUCUGCUUGAAGACUA | 17 | 1102 |
| CCR5-750 | + | CGCCUUGAGCUUAGCAG | 17 | 1103 |
| CCR5-751 | + | AUCCUCACCCUGACCUG | 17 | 1104 |
| CCR5-752 | + | UCCUCACCCUGACCUGA | 17 | 1105 |
| CCR5-753 | + | CCUGACCUGAGGGCUGU | 17 | 1106 |
| CCR5-754 | + | GACCUGAGGGCUGUUGG | 17 | 1107 |
| CCR5-755 | + | CCUUCCUGACCCUCCUU | 17 | 1108 |
| CCR5-756 | + | CUUCUGCAACACCAACC | 17 | 1109 |
| CCR5-757 | + | UCAGCUCAUGACUUAGA | 17 | 1110 |
| CCR5-758 | + | ACGGAGCAAUGCCGUCA | 17 | 1111 |
| CCR5-759 | + | AUGCAGUGCUUGCAGUG | 17 | 1112 |
| CCR5-760 | + | GCUUCCCCAGCUCUCCC | 17 | 1113 |
| CCR5-761 | + | GCCACAAGUCUCUCGCC | 17 | 1114 |
| CCR5-762 | + | ACUUAUUAACCAUACCU | 17 | 1115 |
| CCR5-763 | + | UAUUAACCAUACCUUGG | 17 | 1116 |
| CCR5-764 | + | AUUAACCAUACCUUGGA | 17 | 1117 |
| CCR5-765 | + | UUAACCAUACCUUGGAG | 17 | 1118 |
| CCR5-766 | + | AUAUGUUGCCUUGUACU | 17 | 1119 |
| CCR5-767 | + | CAUUUCUGAAAUAAUUU | 17 | 1120 |
| CCR5-768 | + | GAAUCAGCAAUUCUCUG | 17 | 1121 |
| CCR5-769 | + | UCUUUUAAAUAUACAUA | 17 | 1122 |
| CCR5-770 | + | UAUACAUAAGGAACUUU | 17 | 1123 |
| CCR5-771 | + | AGGAACUUUCGGAGUGA | 17 | 1124 |
| CCR5-772 | + | GGAACUUUCGGAGUGAA | 17 | 1125 |
| CCR5-773 | + | UAACUUGAUGCAUGUGA | 17 | 1126 |
| CCR5-774 | + | AACUUGAUGCAUGUGAA | 17 | 1127 |
| CCR5-775 | + | ACUUGAUGCAUGUGAAG | 17 | 1128 |
| CCR5-776 | + | GUGAAGGGGAGAUAAAA | 17 | 1129 |
| CCR5-777 | + | AUCAACAUAUUUUGAUU | 17 | 1130 |
| CCR5-778 | + | UGGCUUUCUAUAAUUGA | 17 | 1131 |
| CCR5-779 | + | GGCUUUCUAUAAUUGAU | 17 | 1132 |
| CCR5-780 | + | AACAGAUGCCAAAUAAA | 17 | 1133 |
| CCR5-781 | + | CACCCCACCCCCAGCCC | 17 | 1134 |
| CCR5-782 | + | AUGUGCACAACUCUGAC | 17 | 1135 |
| CCR5-783 | + | UGUGCACAACUCUGACU | 17 | 1136 |
| CCR5-784 | + | UAUUUCCUGCUCCCCAG | 17 | 1137 |
| CCR5-785 | + | CCUGCUCCCCAGUGGAU | 17 | 1138 |
| CCR5-786 | + | CUGCUCCCCAGUGGAUC | 17 | 1139 |
| CCR5-787 | + | AACUGAGCUUGCUCGCU | 17 | 1140 |
| CCR5-788 | + | ACUGAGCUUGCUCGCUC | 17 | 1141 |
| CCR5-789 | + | GCUCGGGAGCCUCUUGC | 17 | 1142 |
| CCR5-790 | + | GCAUUUGCAGAAGCGUU | 17 | 1143 |
| CCR5-791 | + | GUUUGGCAAUGUGCUUU | 17 | 1144 |
| CCR5-792 | + | UUUGGAAGAAGACUAAG | 17 | 1145 |
| CCR5-793 | + | GAACUUCUCCCCGACAA | 17 | 1146 |
| CCR5-794 | + | GACAAAGGCAUAGAUGA | 17 | 1147 |
| CCR5-795 | + | ACAAAGGCAUAGAUGAU | 17 | 1148 |
| CCR5-796 | + | CAAAGGCAUAGAUGAUG | 17 | 1149 |
| CCR5-797 | + | CUGUCACCUGCAUAGCU | 17 | 1150 |
| CCR5-798 | + | AGCUACUGCAAUUAUUC | 17 | 1151 |
| CCR5-799 | + | UCAGGCCAAAGAAUUCC | 17 | 1152 |
| CCR5-800 | + | GCCAAAGAAUUCCUGGA | 17 | 1153 |
| CCR5-801 | + | AUUCCUGGAAGGUGUUC | 17 | 1154 |
| CCR5-802 | + | GGAAGGUGUUCAGGAGA | 17 | 1155 |
| CCR5-803 | + | GAGAAGGACAAUGUUGU | 17 | 1156 |
| CCR5-804 | + | AGAAGGACAAUGUUGUA | 17 | 1157 |
| CCR5-805 | + | AAAAUAAACAAUCAUGA | 17 | 1158 |
| CCR5-806 | + | ACCGAAGCAGAGUUUUU | 17 | 1159 |
| CCR5-807 | + | AUGACCAUGACAAGCAG | 17 | 1160 |
| CCR5-808 | + | CCAUGACAAGCAGCGGC | 17 | 1161 |
| CCR5-809 | + | UGACUAUCUUUAAUGUC | 17 | 1162 |
| CCR5-810 | + | AAUUGAUACUGACUGUA | 17 | 1163 |
| CCR5-811 | + | UGGAAAAUGAGAGCUGC | 17 | 1164 |

[0649] Table 1E provides targeting domains for knocking out the CCR5 gene. In an embodiment, the targeting domain is the exact complement of the target domain. Any of the targeting domains in the table can be used with a S. aureus Cas9 molecule that gives double stranded cleavage. Any of the targeting domains in the table can be used with a S. aureus Cas9 single-stranded break nucleases (nickases). In an embodiment, dual targeting is used to create two nicks.

TABLE 1E

| | | | Target | SEQ |
|---|---|---|---|---|
| | DNA | | Site | ID |
| gRNA Name | Strand | Targeting Domain | Length | NO |
| CCR5-812 | − | AUGACAUCAAUUAUUAUACA | 20 | 1165 |
| CCR5-813 | − | UGACAUCAAUUAUUAUACAU | 20 | 1166 |
| CCR5-814 | − | AGCCCUGCCAAAAAAUCAAU | 20 | 1167 |
| CCR5-815 | − | UGGUGUUCAUCUUUGGUUUU | 20 | 1168 |
| CCR5-816 | − | UCCUGAUAAACUGCAAAAGG | 20 | 1169 |
| CCR5-817 | − | UGAUAAACUGCAAAAGGCUG | 20 | 1170 |
| CCR5-818 | − | UUCCUUCUUACUGUCCCCUU | 20 | 1171 |
| CCR5-819 | − | GCUCACUAUGCUGCCGCCCA | 20 | 1172 |
| CCR5-820 | − | CUCACUAUGCUGCCGCCCAG | 20 | 1173 |
| CCR5-821 | − | UGCUGCCGCCCAGUGGGACU | 20 | 1174 |
| CCR5-822 | − | GCUGCCGCCCAGUGGGACUU | 20 | 1175 |
| CCR5-823 | − | UACAAUGUGUCAACUCUUGA | 20 | 1176 |
| CCR5-824 | − | CUAUUUUAUAGGCUUCUUCU | 20 | 1177 |
| CCR5-825 | − | UAUUUUAUAGGCUUCUUCUC | 20 | 1178 |
| CCR5-826 | − | GCUGUGUUUGCUUUAAAAGC | 20 | 1179 |
| CCR5-827 | − | AAAAGCCAGGACGGUCACCU | 20 | 1180 |
| CCR5-828 | − | AAAGCCAGGACGGUCACCUU | 20 | 1181 |
| CCR5-829 | − | GUGGUGACAAGUGUGAUCAC | 20 | 1182 |
| CCR5-830 | − | GGCUGUGUUUGCGUCUCUCC | 20 | 1183 |
| CCR5-831 | − | GCUGUGUUUGCGUCUCUCCC | 20 | 1184 |
| CCR5-832 | − | ACAUCAAUUAUUAUACA | 17 | 1185 |
| CCR5-833 | − | CAUCAAUUAUUAUACAU | 17 | 1186 |
| CCR5-834 | − | CCUGCCAAAAAAUCAAU | 17 | 1187 |
| CCR5-835 | − | UGUUCAUCUUUGGUUUU | 17 | 1188 |
| CCR5-836 | − | UGAUAAACUGCAAAAGG | 17 | 1189 |
| CCR5-837 | − | UAAACUGCAAAAGGCUG | 17 | 1190 |
| CCR5-838 | − | CUUCUUACUGUCCCCUU | 17 | 1191 |
| CCR5-839 | − | CACUAUGCUGCCGCCCA | 17 | 1192 |
| CCR5-840 | − | ACUAUGCUGCCGCCCAG | 17 | 1193 |
| CCR5-841 | − | UGCCGCCCAGUGGGACU | 17 | 1194 |
| CCR5-842 | − | GCCGCCCAGUGGGACUU | 17 | 1195 |
| CCR5-843 | − | AAUGUGUCAACUCUUGA | 17 | 1196 |
| CCR5-844 | − | UUUUAUAGGCUUCUUCU | 17 | 1197 |
| CCR5-845 | − | UUUAUAGGCUUCUUCUC | 17 | 1198 |
| CCR5-846 | − | GUGUUUGCUUUAAAAGC | 17 | 1199 |
| CCR5-847 | − | AGCCAGGACGGUCACCU | 17 | 1200 |
| CCR5-848 | − | GCCAGGACGGUCACCUU | 17 | 1201 |
| CCR5-849 | − | GUGACAAGUGUGAUCAC | 17 | 1202 |
| CCR5-850 | − | UGUGUUUGCGUCUCUCC | 17 | 1203 |
| CCR5-851 | − | GUGUUUGCGUCUCUCCC | 17 | 1204 |
| CCR5-852 | + | GCUUUUAAAGCAAACACAGC | 20 | 1205 |
| CCR5-853 | + | GCCAGGUACCUAUCGAUUGU | 20 | 1206 |
| CCR5-854 | + | CCAGGUACCUAUCGAUUGUC | 20 | 1207 |
| CCR5-855 | + | AGGUACCUAUCGAUUGUCAG | 20 | 1208 |
| CCR5-856 | + | UAUCGAUUGUCAGGAGGAUG | 20 | 1209 |
| CCR5-857 | + | CGAUUGUCAGGAGGAUGAUG | 20 | 1210 |
| CCR5-858 | + | GAGGAUGAUGAAGAAGAUUC | 20 | 1211 |
| CCR5-859 | + | GGAUGAUGAAGAAGAUUCCA | 20 | 1212 |
| CCR5-860 | + | UGAUGAAGAAGAUUCCAGAG | 20 | 1213 |
| CCR5-861 | + | CAGAGAAGAAGCCUAUAAAA | 20 | 1214 |
| CCR5-862 | + | CUAUAAAAUAGAGCCCUGUC | 20 | 1215 |
| CCR5-863 | + | AUUGUAUUUCCAAAGUCCCA | 20 | 1216 |
| CCR5-864 | + | UCCCACUGGGCGGCAGCAUA | 20 | 1217 |
| CCR5-865 | + | GGGCGGCAGCAUAGUGAGCC | 20 | 1218 |
| CCR5-866 | + | CGGCAGCAUAGUGAGCCCAG | 20 | 1219 |
| CCR5-867 | + | GGCAGCAUAGUGAGCCCAGA | 20 | 1220 |
| CCR5-868 | + | GCAGCAUAGUGAGCCCAGAA | 20 | 1221 |
| CCR5-869 | + | UGAGCCCAGAAGGGGACAGU | 20 | 1222 |
| CCR5-870 | + | GCCCAGAAGGGGACAGUAAG | 20 | 1223 |
| CCR5-871 | + | CCCAGAAGGGGACAGUAAGA | 20 | 1224 |
| CCR5-872 | + | AGUAAGAAGGAAAAACAGGU | 20 | 1225 |
| CCR5-873 | + | ACAGGUCAGAGAUGGCCAGG | 20 | 1226 |
| CCR5-874 | + | UUCAGCCUUUUGCAGUUUAU | 20 | 1227 |
| CCR5-875 | + | GCCUUUUGCAGUUUAUCAGG | 20 | 1228 |
| CCR5-876 | + | CUUUUGCAGUUUAUCAGGAU | 20 | 1229 |
| CCR5-877 | + | UGUUGCCCACAAAACCAAAG | 20 | 1230 |
| CCR5-878 | + | AAAACCAAAGAUGAACACCA | 20 | 1231 |
| CCR5-879 | + | CAAAGAUGAACACCAGUGAG | 20 | 1232 |
| CCR5-880 | + | GAUGAACACCAGUGAGUAGA | 20 | 1233 |
| CCR5-881 | + | AUGAACACCAGUGAGUAGAG | 20 | 1234 |
| CCR5-882 | + | ACCAGUGAGUAGAGCGGAGG | 20 | 1235 |
| CCR5-883 | + | CCAGUGAGUAGAGCGGAGGC | 20 | 1236 |
| CCR5-884 | + | GAGUAGAGCGGAGGCAGGAG | 20 | 1237 |
| CCR5-885 | + | GCUUCACAUUGAUUUUUUGG | 20 | 1238 |
| CCR5-886 | + | AUAAUAAUUGAUGUCAUAGA | 20 | 1239 |
| CCR5-887 | + | UUUAAAGCAAACACAGC | 17 | 1240 |
| CCR5-888 | + | AGGUACCUAUCGAUUGU | 17 | 1241 |
| CCR5-889 | + | GGUACCUAUCGAUUGUC | 17 | 1242 |
| CCR5-890 | + | UACCUAUCGAUUGUCAG | 17 | 1243 |
| CCR5-891 | + | CGAUUGUCAGGAGGAUG | 17 | 1244 |
| CCR5-892 | + | UUGUCAGGAGGAUGAUG | 17 | 1245 |
| CCR5-893 | + | GAUGAUGAAGAAGAUUC | 17 | 1246 |
| CCR5-894 | + | UGAUGAAGAAGAUUCCA | 17 | 1247 |
| CCR5-895 | + | UGAAGAAGAUUCCAGAG | 17 | 1248 |
| CCR5-896 | + | AGAAGAAGCCUAUAAAA | 17 | 1249 |
| CCR5-897 | + | UAAAAUAGAGCCCUGUC | 17 | 1250 |
| CCR5-898 | + | GUAUUUCCAAAGUCCCA | 17 | 1251 |
| CCR5-899 | + | CACUGGGCGGCAGCAUA | 17 | 1252 |
| CCR5-900 | + | CGGCAGCAUAGUGAGCC | 17 | 1253 |
| CCR5-901 | + | CAGCAUAGUGAGCCCAG | 17 | 1254 |
| CCR5-902 | + | AGCAUAGUGAGCCCAGA | 17 | 1255 |
| CCR5-903 | + | GCAUAGUGAGCCCAGAA | 17 | 1256 |
| CCR5-904 | + | GCCCAGAAGGGGACAGU | 17 | 1257 |
| CCR5-905 | + | CAGAAGGGGACAGUAAG | 17 | 1258 |
| CCR5-906 | + | AGAAGGGGACAGUAAGA | 17 | 1259 |
| CCR5-907 | + | AAGAAGGAAAAACAGGU | 17 | 1260 |
| CCR5-908 | + | GGUCAGAGAUGGCCAGG | 17 | 1261 |
| CCR5-909 | + | AGCCUUUUGCAGUUUAU | 17 | 1262 |
| CCR5-910 | + | UUUUGCAGUUUAUCAGG | 17 | 1263 |
| CCR5-911 | + | UUGCAGUUUAUCAGGAU | 17 | 1264 |
| CCR5-912 | + | UGCCCACAAAACCAAAG | 17 | 1265 |
| CCR5-913 | + | ACCAAAGAUGAACACCA | 17 | 1266 |
| CCR5-914 | + | AGAUGAACACCAGUGAG | 17 | 1267 |
| CCR5-915 | + | GAACACCAGUGAGUAGA | 17 | 1268 |
| CCR5-916 | + | AACACCAGUGAGUAGAG | 17 | 1269 |
| CCR5-917 | + | AGUGAGUAGAGCGGAGG | 17 | 1270 |
| CCR5-918 | + | GUGAGUAGAGCGGAGGC | 17 | 1271 |
| CCR5-919 | + | UAGAGCGGAGGCAGGAG | 17 | 1272 |
| CCR5-920 | + | UCACAUUGAUUUUUUGG | 17 | 1273 |
| CCR5-921 | + | AUAAUUGAUGUCAUAGA | 17 | 1274 |
| CCR5-922 | − | CCAUACAGUCAGUAUCAAUU | 20 | 1275 |
| CCR5-923 | − | CAUACAGUCAGUAUCAAUUC | 20 | 1276 |
| CCR5-924 | − | ACAGUCAGUAUCAAUUCUGG | 20 | 1277 |
| CCR5-925 | − | AGACAUUAAAGAUAGUCAUC | 20 | 1278 |
| CCR5-926 | − | GACAUUAAAGAUAGUCAUCU | 20 | 1279 |
| CCR5-927 | − | UUGUCAUGGUCAUCUGCUAC | 20 | 1280 |
| CCR5-928 | − | UGUCAUGGUCAUCUGCUACU | 20 | 1281 |
| CCR5-929 | − | GUCAUGGUCAUCUGCUACUC | 20 | 1282 |
| CCR5-930 | − | CUAAAAACUCUGCUUCGGUG | 20 | 1283 |
| CCR5-931 | − | AACUCUGCUUCGGUGUCGAA | 20 | 1284 |
| CCR5-932 | − | CUCUGCUUCGGUGUCGAAAU | 20 | 1285 |
| CCR5-933 | − | UGCUUCGGUGUCGAAAUGAG | 20 | 1286 |
| CCR5-934 | − | UUCGGUGUCGAAAUGAGAAG | 20 | 1287 |
| CCR5-935 | − | CGAAAUGAGAAGAAGAGGCA | 20 | 1288 |
| CCR5-936 | − | AGAAGAAGAGGCACAGGGCU | 20 | 1289 |
| CCR5-937 | − | AUGAUUGUUUAUUUUCUCUU | 20 | 1290 |
| CCR5-938 | − | CCUACAACAUUGUCCUUCUC | 20 | 1291 |
| CCR5-939 | − | UCCUUCUCCUGAACACCUUC | 20 | 1292 |
| CCR5-940 | − | CCUUCUCCUGAACACCUUCC | 20 | 1293 |
| CCR5-941 | − | CCUUCCAGGAAUUCUUUGGC | 20 | 1294 |
| CCR5-942 | − | AUUGCAGUAGCUCUAACAGG | 20 | 1295 |
| CCR5-943 | − | GGACCAAGCUAUGCAGGUGA | 20 | 1296 |
| CCR5-944 | − | UAUGCAGGUGACAGAGACUC | 20 | 1297 |
| CCR5-945 | − | AUGCAGGUGACAGAGACUCU | 20 | 1298 |
| CCR5-946 | − | CCCCAUCAUCUAUGCCUUUG | 20 | 1299 |
| CCR5-947 | − | CCCAUCAUCUAUGCCUUUGU | 20 | 1300 |
| CCR5-948 | − | CCAUCAUCUAUGCCUUUGUC | 20 | 1301 |
| CCR5-949 | − | CAUCAUCUAUGCCUUUGUCG | 20 | 1302 |
| CCR5-950 | − | UCAUCUAUGCCUUUGUCGGG | 20 | 1303 |
| CCR5-951 | − | GCCUUUGUCGGGGAGAAGUU | 20 | 1304 |
| CCR5-952 | − | AUGCUGUUCUAUUUUCCAGC | 20 | 1305 |
| CCR5-953 | − | UAUUUUCCAGCAAGAGGCUC | 20 | 1306 |
| CCR5-954 | − | UUCCAGCAAGAGGCUCCCGA | 20 | 1307 |
| CCR5-955 | − | CUCAGUUUACACCCGAUCCA | 20 | 1308 |
| CCR5-956 | − | UCAGUUUACACCCGAUCCAC | 20 | 1309 |
| CCR5-957 | − | CAGUUUACACCCGAUCCACU | 20 | 1310 |
| CCR5-958 | − | AGUUUACACCCGAUCCACUG | 20 | 1311 |
| CCR5-959 | − | ACACCCGAUCCACUGGGGAG | 20 | 1312 |
| CCR5-960 | − | CACCCGAUCCACUGGGGAGC | 20 | 1313 |
| CCR5-961 | − | CUGGGGAGCAGGAAAUAUCU | 20 | 1314 |
| CCR5-962 | − | AAUAUCUGUGGGCUUGUGAC | 20 | 1315 |
| CCR5-963 | − | GGCUUGUGACACGGACUCAA | 20 | 1316 |
| CCR5-964 | − | AAGUGGGCUGGUGACCCAGU | 20 | 1317 |
| CCR5-965 | − | GCUUAGUUUUCAUACACAGC | 20 | 1318 |
| CCR5-966 | − | GUUUUCAUACACAGCCUGGG | 20 | 1319 |
| CCR5-967 | − | UUUUCAUACACAGCCUGGGC | 20 | 1320 |
| CCR5-968 | − | UUUCAUACACAGCCUGGGCU | 20 | 1321 |
| CCR5-969 | − | AUACACAGCCUGGGCUGGGG | 20 | 1322 |
| CCR5-970 | − | UACACAGCCUGGGCUGGGGG | 20 | 1323 |
| CCR5-971 | − | CAGCCUGGGCUGGGGGUGGG | 20 | 1324 |
| CCR5-972 | − | AGCCUGGGCUGGGGGUGGGG | 20 | 1325 |
| CCR5-973 | − | GCCUGGGCUGGGGGUGGGGU | 20 | 1326 |
| CCR5-974 | − | CUGGGCUGGGGGUGGGGUGG | 20 | 1327 |
| CCR5-975 | − | GUGGGAGAGGUCUUUUUUAA | 20 | 1328 |
| CCR5-976 | − | UGGGAGAGGUCUUUUUUAAA | 20 | 1329 |
| CCR5-977 | − | UUAAAAGGAAGUUACUGUUA | 20 | 1330 |
| CCR5-978 | − | AAAAGGAAGUUACUGUUAUA | 20 | 1331 |
| CCR5-979 | − | UCUUUUAAGCCCAUCAAUUA | 20 | 1332 |
| CCR5-980 | − | AGCCAAAUCAAAAUAUGUUG | 20 | 1333 |
| CCR5-981 | − | UGACAAACUCUCCCUUCACU | 20 | 1334 |
| CCR5-982 | − | AGUUCCUUAUGUAUAUUUAA | 20 | 1335 |
| CCR5-983 | − | GUAUAUUUAAAAGAAAGCCU | 20 | 1336 |
| CCR5-984 | − | AUAUUUAAAAGAAAGCCUCA | 20 | 1337 |
| CCR5-985 | − | CCUCAGAGAAUUGCUGAUUC | 20 | 1338 |
| CCR5-986 | − | UGAUUCUUGAGUUUAGUGAU | 20 | 1339 |
| CCR5-987 | − | CUUGAGUUUAGUGAUCUGAA | 20 | 1340 |
| CCR5-988 | − | CAGAAAUACCAAAAUUAUUU | 20 | 1341 |
| CCR5-989 | − | AAACAGGUCUUUGUCUUGCU | 20 | 1342 |
| CCR5-990 | − | AACAGGUCUUUGUCUUGCUA | 20 | 1343 |
| CCR5-991 | − | ACAGGUCUUUGUCUUGCUAU | 20 | 1344 |
| CCR5-992 | − | CAGGUCUUUGUCUUGCUAUG | 20 | 1345 |
| CCR5-993 | − | GGUCUUUGUCUUGCUAUGGG | 20 | 1346 |
| CCR5-994 | − | UUGCUAUGGGGAGAAAAGAC | 20 | 1347 |
| CCR5-995 | − | AGACAUGAAUAUGAUUAGUA | 20 | 1348 |
| CCR5-996 | − | GUUAAUAAGUUUCACUGACU | 20 | 1349 |
| CCR5-997 | − | UUUCACUGACUUAGAACCAG | 20 | 1350 |
| CCR5-998 | − | UCACUGACUUAGAACCAGGC | 20 | 1351 |
| CCR5-999 | − | CCAGGCGAGAGACUUGUGGC | 20 | 1352 |
| CCR5-1000 | − | CAGGCGAGAGACUUGUGGCC | 20 | 1353 |
| CCR5-1001 | − | AGGCGAGAGACUUGUGGCCU | 20 | 1354 |
| CCR5-1002 | − | GCGAGAGACUUGUGGCCUGG | 20 | 1355 |
| CCR5-1003 | − | AGACUUGUGGCCUGGGAGAG | 20 | 1356 |
| CCR5-1004 | − | GACUUGUGGCCUGGGAGAGC | 20 | 1357 |
| CCR5-1005 | − | ACUUGUGGCCUGGGAGAGCU | 20 | 1358 |
| CCR5-1006 | − | CUUGUGGCCUGGGAGAGCUG | 20 | 1359 |
| CCR5-1007 | − | GAGCUGGGGAAGCUUCUUAA | 20 | 1360 |
| CCR5-1008 | − | GCUGGGGAAGCUUCUUAAAU | 20 | 1361 |
| CCR5-1009 | − | GGGGAAGCUUCUUAAAUGAG | 20 | 1362 |
| CCR5-1010 | − | GGGAAGCUUCUUAAAUGAGA | 20 | 1363 |
| CCR5-1011 | − | CUUCUUAAAUGAGAAGGAAU | 20 | 1364 |
| CCR5-1012 | − | UAAAUGAGAAGGAAUUUGAG | 20 | 1365 |
| CCR5-1013 | − | UCAUCUAUUGCUGGCAAAGA | 20 | 1366 |
| CCR5-1014 | − | AGCCUCACUGCAAGCACUGC | 20 | 1367 |
| CCR5-1015 | − | UGCAUGGGCAAGCUUGGCUG | 20 | 1368 |
| CCR5-1016 | − | AUGGGCAAGCUUGGCUGUAG | 20 | 1369 |
| CCR5-1017 | − | UGGGCAAGCUUGGCUGUAGA | 20 | 1370 |
| CCR5-1018 | − | AGCUUGGCUGUAGAAGGAGA | 20 | 1371 |
| CCR5-1019 | − | GUAGAAGGAGACAGAGCUGG | 20 | 1372 |
| CCR5-1020 | − | UAGAAGGAGACAGAGCUGGU | 20 | 1373 |
| CCR5-1021 | − | AGAAGGAGACAGAGCUGGUU | 20 | 1374 |
| CCR5-1022 | − | ACAGAGCUGGUUGGGAAGAC | 20 | 1375 |
| CCR5-1023 | − | CAGAGCUGGUUGGGAAGACA | 20 | 1376 |
| CCR5-1024 | − | AGAGCUGGUUGGGAAGACAU | 20 | 1377 |
| CCR5-1025 | − | GAGCUGGUUGGGAAGACAUG | 20 | 1378 |
| CCR5-1026 | − | GCUGGUUGGGAAGACAUGGG | 20 | 1379 |
| CCR5-1027 | − | CUGGUUGGGAAGACAUGGGG | 20 | 1380 |
| CCR5-1028 | − | GUUGGGAAGACAUGGGGAGG | 20 | 1381 |
| CCR5-1029 | − | AGGAAGGACAAGGCUAGAUC | 20 | 1382 |
| CCR5-1030 | − | AAGGACAAGGCUAGAUCAUG | 20 | 1383 |
| CCR5-1031 | − | GGCAUUGCUCCGUCUAAGUC | 20 | 1384 |
| CCR5-1032 | − | UGCUCCGUCUAAGUCAUGAG | 20 | 1385 |
| CCR5-1033 | − | CGUCUAAGUCAUGAGCUGAG | 20 | 1386 |
| CCR5-1034 | − | GUCUAAGUCAUGAGCUGAGC | 20 | 1387 |
| CCR5-1035 | − | UCUAAGUCAUGAGCUGAGCA | 20 | 1388 |
| CCR5-1036 | − | GGAGAUCCUGGUUGGUGUUG | 20 | 1389 |
| CCR5-1037 | − | GAAGGUUUACUCUGUGGCCA | 20 | 1390 |
| CCR5-1038 | − | AAGGUUUACUCUGUGGCCAA | 20 | 1391 |
| CCR5-1039 | − | GGUUUACUCUGUGGCCAAAG | 20 | 1392 |
| CCR5-1040 | − | CUCUGUGGCCAAAGGAGGGU | 20 | 1393 |
| CCR5-1041 | − | UCUGUGGCCAAAGGAGGGUC | 20 | 1394 |
| CCR5-1042 | − | GUGGCCAAAGGAGGGUCAGG | 20 | 1395 |
| CCR5-1043 | − | CCAAAGGAGGGUCAGGAAGG | 20 | 1396 |
| CCR5-1044 | − | GGUCAGGAAGGAUGAGCAUU | 20 | 1397 |
| CCR5-1045 | − | GAAGGAUGAGCAUUUAGGGC | 20 | 1398 |
| CCR5-1046 | − | AAGGAUGAGCAUUUAGGGCA | 20 | 1399 |
| CCR5-1047 | − | ACCACCAACAGCCCUCAGGU | 20 | 1400 |
| CCR5-1048 | − | CCAACAGCCCUCAGGUCAGG | 20 | 1401 |
| CCR5-1049 | − | AACAGCCCUCAGGUCAGGGU | 20 | 1402 |
| CCR5-1050 | − | GCCUCUGCUAAGCUCAAGGC | 20 | 1403 |
| CCR5-1051 | − | CUCUGCUAAGCUCAAGGCGU | 20 | 1404 |
| CCR5-1052 | − | GCUAAGCUCAAGGCGUGAGG | 20 | 1405 |
| CCR5-1053 | − | CUAAGCUCAAGGCGUGAGGA | 20 | 1406 |
| CCR5-1054 | − | UAAGCUCAAGGCGUGAGGAU | 20 | 1407 |
| CCR5-1055 | − | GCUCAAGGCGUGAGGAUGGG | 20 | 1408 |
| CCR5-1056 | − | CUCAAGGCGUGAGGAUGGGA | 20 | 1409 |
| CCR5-1057 | − | CAAGGCGUGAGGAUGGGAAG | 20 | 1410 |
| CCR5-1058 | − | AAGGCGUGAGGAUGGGAAGG | 20 | 1411 |
| CCR5-1059 | − | AGGCGUGAGGAUGGGAAGGA | 20 | 1412 |
| CCR5-1060 | − | GGAAGGAGGGAGGUAUUCGU | 20 | 1413 |
| CCR5-1061 | − | GGAGGGAGGUAUUCGUAAGG | 20 | 1414 |
| CCR5-1062 | − | GAGGGAGGUAUUCGUAAGGA | 20 | 1415 |
| CCR5-1063 | − | AGGGAGGUAUUCGUAAGGAU | 20 | 1416 |
| CCR5-1064 | − | GAGGUAUUCGUAAGGAUGGG | 20 | 1417 |
| CCR5-1065 | − | AGGUAUUCGUAAGGAUGGGA | 20 | 1418 |
| CCR5-1066 | − | GUAUUCGUAAGGAUGGGAAG | 20 | 1419 |
| CCR5-1067 | − | UAUUCGUAAGGAUGGGAAGG | 20 | 1420 |
| CCR5-1068 | − | AUUCGUAAGGAUGGGAAGGA | 20 | 1421 |
| CCR5-1069 | − | GGGAGGUAUUCGUGCAGCAU | 20 | 1422 |
| CCR5-1070 | − | GAGGUAUUCGUGCAGCAUAU | 20 | 1423 |
| CCR5-1071 | − | UCGUGCAGCAUAUGAGGAUG | 20 | 1424 |
| CCR5-1072 | − | AUAUGAGGAUGCAGAGUCAG | 20 | 1425 |
| CCR5-1073 | − | AGGAUGCAGAGUCAGCAGAA | 20 | 1426 |
| CCR5-1074 | − | GGAUGCAGAGUCAGCAGAAC | 20 | 1427 |
| CCR5-1075 | − | GCAGAGUCAGCAGAACUGGG | 20 | 1428 |
| CCR5-1076 | − | UCAGCAGAACUGGGGUGGAU | 20 | 1429 |
| CCR5-1077 | − | AGAACUGGGGUGGAUUUGGG | 20 | 1430 |
| CCR5-1078 | − | GAACUGGGGUGGAUUUGGGU | 20 | 1431 |
| CCR5-1079 | − | GGGGUGGAUUUGGGUUGGAA | 20 | 1432 |
| CCR5-1080 | − | GGUGGAUUUGGGUUGGAAGU | 20 | 1433 |
| CCR5-1081 | − | UUUGGGUUGGAAGUGAGGGU | 20 | 1434 |
| CCR5-1082 | − | UGGGUUGGAAGUGAGGGUCA | 20 | 1435 |
| CCR5-1083 | − | GGUUGGAAGUGAGGGUCAGA | 20 | 1436 |
| CCR5-1084 | − | GUUGGAAGUGAGGGUCAGAG | 20 | 1437 |
| CCR5-1085 | − | AGUGAGGGUCAGAGAGGAGU | 20 | 1438 |
| CCR5-1086 | − | UGAGGGUCAGAGAGGAGUCA | 20 | 1439 |
| CCR5-1087 | − | AGGGUCAGAGAGGAGUCAGA | 20 | 1440 |
| CCR5-1088 | − | AUCCCUAGUCUUCAAGCAGA | 20 | 1441 |
| CCR5-1089 | − | UCCCUAGUCUUCAAGCAGAU | 20 | 1442 |
| CCR5-1090 | − | CCUAGUCUUCAAGCAGAUUG | 20 | 1443 |
| CCR5-1091 | − | CAAGCAGAUUGGAGAAACCC | 20 | 1444 |
| CCR5-1092 | − | CCUUGAAAAGACAUCAAGCA | 20 | 1445 |
| CCR5-1093 | − | UGAAAAGACAUCAAGCACAG | 20 | 1446 |
| CCR5-1094 | − | GAAAAGACAUCAAGCACAGA | 20 | 1447 |
| CCR5-1095 | − | AAAGACAUCAAGCACAGAAG | 20 | 1448 |
| CCR5-1096 | − | AAGACAUCAAGCACAGAAGG | 20 | 1449 |
| CCR5-1097 | − | GACAUCAAGCACAGAAGGAG | 20 | 1450 |
| CCR5-1098 | − | ACAUCAAGCACAGAAGGAGG | 20 | 1451 |
| CCR5-1099 | − | AUCAAGCACAGAAGGAGGAG | 20 | 1452 |
| CCR5-1100 | − | UCAAGCACAGAAGGAGGAGG | 20 | 1453 |
| CCR5-1101 | − | AGGAGGAGGAGGUUUAGGUC | 20 | 1454 |
| CCR5-1102 | − | AGGAGGAGGUUUAGGUCAAG | 20 | 1455 |
| CCR5-1103 | − | AGGUUUAGGUCAAGAAGAAG | 20 | 1456 |
| CCR5-1104 | − | AAGAAGAUGGAUUGGUGUAA | 20 | 1457 |
| CCR5-1105 | − | AGAUGGAUUGGUGUAAAAGG | 20 | 1458 |
| CCR5-1106 | − | AAAAGGAUGGGUCUGGUUUG | 20 | 1459 |
| CCR5-1107 | − | AUGGGUCUGGUUUGCAGAGC | 20 | 1460 |
| CCR5-1108 | − | AGACUCCAGGCUGUCUUUCA | 20 | 1461 |
| CCR5-1109 | − | AGAUUUCCUUCCCAUCCCAG | 20 | 1462 |
| CCR5-1110 | − | UUCCCAUCCCAGCUGAAAUA | 20 | 1463 |
| CCR5-1111 | − | CCCAUCCCAGCUGAAAUACU | 20 | 1464 |
| CCR5-1112 | − | CCAUCCCAGCUGAAAUACUG | 20 | 1465 |
| CCR5-1113 | − | CUGAAAUACUGAGGGGUCUC | 20 | 1466 |
| CCR5-1114 | − | UGAAAUACUGAGGGGUCUCC | 20 | 1467 |
| CCR5-1115 | − | AAAUACUGAGGGGUCUCCAG | 20 | 1468 |
| CCR5-1116 | − | AAUACUGAGGGGUCUCCAGG | 20 | 1469 |
| CCR5-1117 | − | UCCAGGAGGAGACUAGAUUU | 20 | 1470 |
| CCR5-1118 | − | GAGACUAGAUUUAUGAAUAC | 20 | 1471 |
| CCR5-1119 | − | GAUUUAUGAAUACACGAGGU | 20 | 1472 |
| CCR5-1120 | − | AAUACACGAGGUAUGAGGUC | 20 | 1473 |
| CCR5-1121 | − | AUACACGAGGUAUGAGGUCU | 20 | 1474 |
| CCR5-1122 | − | GAACAUACUUCAGCUCACAC | 20 | 1475 |
| CCR5-1123 | − | AGCUCACACAUGAGAUCUAG | 20 | 1476 |
| CCR5-1124 | − | CUCACACAUGAGAUCUAGGU | 20 | 1477 |
| CCR5-1125 | − | GAUUACCUAGUAGUCAUUUC | 20 | 1478 |
| CCR5-1126 | − | AGUAGUCAUUUCAUGGGUUG | 20 | 1479 |
| CCR5-1127 | − | GUAGUCAUUUCAUGGGUUGU | 20 | 1480 |
| CCR5-1128 | − | UAGUCAUUUCAUGGGUUGUU | 20 | 1481 |
| CCR5-1129 | − | GUCAUUUCAUGGGUUGUUGG | 20 | 1482 |
| CCR5-1130 | − | UGGGUUGUUGGGAGGAUUCU | 20 | 1483 |
| CCR5-1131 | − | CAAACUCUUAGUUACUCAUU | 20 | 1484 |
| CCR5-1132 | − | AAACUCUUAGUUACUCAUUC | 20 | 1485 |
| CCR5-1133 | − | UUACUCAUUCAGGGAUAGCA | 20 | 1486 |
| CCR5-1134 | − | GGAUAGCACUGAGCAAAGCA | 20 | 1487 |
| CCR5-1135 | − | ACUGAGCAAAGCAUUGAGCA | 20 | 1488 |
| CCR5-1136 | − | CUGAGCAAAGCAUUGAGCAA | 20 | 1489 |
| CCR5-1137 | − | CAUUGAGCAAAGGGGUCCCA | 20 | 1490 |
| CCR5-1138 | − | AGCAAAGGGGUCCCAUAGAG | 20 | 1491 |
| CCR5-1139 | − | CAAAGGGGUCCCAUAGAGGU | 20 | 1492 |
| CCR5-1140 | − | AAAGGGGUCCCAUAGAGGUG | 20 | 1493 |
| CCR5-1141 | − | AAGGGGUCCCAUAGAGGUGA | 20 | 1494 |
| CCR5-1142 | − | CCCAUAGAGGUGAGGGAAGC | 20 | 1495 |
| CCR5-1143 | − | CAUUUAACCGUCAAUAGGCA | 20 | 1496 |
| CCR5-1144 | − | AUUUAACCGUCAAUAGGCAA | 20 | 1497 |
| CCR5-1145 | − | UUUAACCGUCAAUAGGCAAA | 20 | 1498 |
| CCR5-1146 | − | UUAACCGUCAAUAGGCAAAG | 20 | 1499 |
| CCR5-1147 | − | UAACCGUCAAUAGGCAAAGG | 20 | 1500 |
| CCR5-1148 | − | AACCGUCAAUAGGCAAAGGG | 20 | 1501 |
| CCR5-1149 | − | CGUCAAUAGGCAAAGGGGGG | 20 | 1502 |
| CCR5-1150 | − | GUCAAUAGGCAAAGGGGGGA | 20 | 1503 |
| CCR5-1151 | − | GGGGGAAGGGACAUAUUCAU | 20 | 1504 |
| CCR5-1152 | − | GGGGAAGGGACAUAUUCAUU | 20 | 1505 |
| CCR5-1153 | − | UCAUUUGGAAAUAAGCUGCC | 20 | 1506 |
| CCR5-1154 | − | ACCAGCCUCCGUAUUUCAGA | 20 | 1507 |
| CCR5-1155 | − | GCCUCCGUAUUUCAGACUGA | 20 | 1508 |
| CCR5-1156 | − | CCUCCGUAUUUCAGACUGAA | 20 | 1509 |
| CCR5-1157 | − | CUCCGUAUUUCAGACUGAAU | 20 | 1510 |
| CCR5-1158 | − | GUAUUUCAGACUGAAUGGGG | 20 | 1511 |
| CCR5-1159 | − | UAUUUCAGACUGAAUGGGGG | 20 | 1512 |
| CCR5-1160 | − | AUUUCAGACUGAAUGGGGGU | 20 | 1513 |
| CCR5-1161 | − | UUUCAGACUGAAUGGGGGUG | 20 | 1514 |
| CCR5-1162 | − | UUCAGACUGAAUGGGGGUGG | 20 | 1515 |
| CCR5-1163 | − | UCAGACUGAAUGGGGGUGGG | 20 | 1516 |
| CCR5-1164 | − | GAUGCCUUCUCCAGACAAAC | 20 | 1517 |
| CCR5-1165 | − | UCCAGACAAACCAGAAGCAA | 20 | 1518 |
| CCR5-1166 | − | AAAAUCGUCUCUCCCUCCCU | 20 | 1519 |
| CCR5-1167 | − | CGUCUCUCCCUCCCUUUGAA | 20 | 1520 |
| CCR5-1168 | − | AUGAAUAUACCCCUUAGUGU | 20 | 1521 |
| CCR5-1169 | − | GUUUGGGUAUAUUCAUUUCA | 20 | 1522 |
| CCR5-1170 | − | UUUGGGUAUAUUCAUUUCAA | 20 | 1523 |
| CCR5-1171 | − | UUGGGUAUAUUCAUUUCAAA | 20 | 1524 |
| CCR5-1172 | − | GGGUAUAUUCAUUUCAAAGG | 20 | 1525 |
| CCR5-1173 | − | GUAUAUUCAUUUCAAAGGGA | 20 | 1526 |
| CCR5-1174 | − | AUAUUCAUUUCAAAGGGAGA | 20 | 1527 |
| CCR5-1175 | − | AUUCAUUUCAAAGGGAGAGA | 20 | 1528 |
| CCR5-1176 | − | UCAUAUGAUUGUGCACAUAC | 20 | 1529 |
| CCR5-1177 | − | UGCACAUACUUGAGACUGUU | 20 | 1530 |
| CCR5-1178 | − | UACUUGAGACUGUUUUGAAU | 20 | 1531 |
| CCR5-1179 | − | ACUUGAGACUGUUUUGAAUU | 20 | 1532 |
| CCR5-1180 | − | CUUGAGACUGUUUUGAAUUU | 20 | 1533 |
| CCR5-1181 | − | UUGAGACUGUUUUGAAUUUG | 20 | 1534 |
| CCR5-1182 | − | ACCAUCAUAGUACAGGUAAG | 20 | 1535 |
| CCR5-1183 | − | CAUCAUAGUACAGGUAAGGU | 20 | 1536 |
| CCR5-1184 | − | AUCAUAGUACAGGUAAGGUG | 20 | 1537 |
| CCR5-1185 | − | UCAUAGUACAGGUAAGGUGA | 20 | 1538 |
| CCR5-1186 | − | AGGUGAGGGAAUAGUAAGUG | 20 | 1539 |
| CCR5-1187 | − | GUGAGGGAAUAGUAAGUGGU | 20 | 1540 |
| CCR5-1188 | − | AGUAAGUGGUGAGAACUACU | 20 | 1541 |
| CCR5-1189 | − | GUAAGUGGUGAGAACUACUC | 20 | 1542 |
| CCR5-1190 | − | UAAGUGGUGAGAACUACUCA | 20 | 1543 |
| CCR5-1191 | − | UGGUGAGAACUACUCAGGGA | 20 | 1544 |
| CCR5-1192 | − | UACUCAGGGAAUGAAGGUGU | 20 | 1545 |
| CCR5-1193 | − | AAUGAAGGUGUCAGAAUAAU | 20 | 1546 |
| CCR5-1194 | − | GCUACUGACUUUCUCAGCCU | 20 | 1547 |
| CCR5-1195 | − | GACUUUCUCAGCCUCUGAAU | 20 | 1548 |
| CCR5-1196 | − | UCAGCCUCUGAAUAUGAACG | 20 | 1549 |
| CCR5-1197 | − | GUGAGCAUUGUGGCUGUCAG | 20 | 1550 |
| CCR5-1198 | − | UGAGCAUUGUGGCUGUCAGC | 20 | 1551 |
| CCR5-1199 | − | GUGGCUGUCAGCAGGAAGCA | 20 | 1552 |
| CCR5-1200 | − | GCUGUCAGCAGGAAGCAACG | 20 | 1553 |
| CCR5-1201 | − | CUGUCAGCAGGAAGCAACGA | 20 | 1554 |
| CCR5-1202 | − | UGUCAGCAGGAAGCAACGAA | 20 | 1555 |
| CCR5-1203 | − | UUUCCUUUUGCUCUUAAGUU | 20 | 1556 |
| CCR5-1204 | − | UUCCUUUUGCUCUUAAGUUG | 20 | 1557 |
| CCR5-1205 | − | CCUUUUGCUCUUAAGUUGUG | 20 | 1558 |
| CCR5-1206 | − | UGGAGAGUGCAACAGUAGCA | 20 | 1559 |
| CCR5-1207 | − | GUAGCAUAGGACCCUACCCU | 20 | 1560 |
| CCR5-1208 | − | AUUUGCAUAUUCUUAUGUAU | 20 | 1561 |
| CCR5-1209 | − | AUGUGAAAGUUACAAAUUGC | 20 | 1562 |
| CCR5-1210 | − | GAAAGUUACAAAUUGCUUGA | 20 | 1563 |
| CCR5-1211 | − | UACAGUCAGUAUCAAUU | 17 | 1564 |
| CCR5-1212 | − | ACAGUCAGUAUCAAUUC | 17 | 1565 |
| CCR5-1213 | − | GUCAGUAUCAAUUCUGG | 17 | 1566 |
| CCR5-1214 | − | CAUUAAAGAUAGUCAUC | 17 | 1567 |
| CCR5-1215 | − | AUUAAAGAUAGUCAUCU | 17 | 1568 |
| CCR5-1216 | − | UCAUGGUCAUCUGCUAC | 17 | 1569 |
| CCR5-1217 | − | CAUGGUCAUCUGCUACU | 17 | 1570 |
| CCR5-1218 | − | AUGGUCAUCUGCUACUC | 17 | 1571 |
| CCR5-1219 | − | AAAACUCUGCUUCGGUG | 17 | 1572 |
| CCR5-1220 | − | UCUGCUUCGGUGUCGAA | 17 | 1573 |
| CCR5-1221 | − | UGCUUCGGUGUCGAAAU | 17 | 1574 |
| CCR5-1222 | − | UUCGGUGUCGAAAUGAG | 17 | 1575 |
| CCR5-1223 | − | GGUGUCGAAAUGAGAAG | 17 | 1576 |
| CCR5-1224 | − | AAUGAGAAGAAGAGGCA | 17 | 1577 |
| CCR5-1225 | − | AGAAGAGGCACAGGGCU | 17 | 1578 |
| CCR5-1226 | − | AUUGUUUAUUUUCUCUU | 17 | 1579 |
| CCR5-1227 | − | ACAACAUUGUCCUUCUC | 17 | 1580 |
| CCR5-1228 | − | UUCUCCUGAACACCUUC | 17 | 1581 |
| CCR5-1229 | − | UCUCCUGAACACCUUCC | 17 | 1582 |
| CCR5-1230 | − | UCCAGGAAUUCUUUGGC | 17 | 1583 |
| CCR5-1231 | − | GCAGUAGCUCUAACAGG | 17 | 1584 |
| CCR5-1232 | − | CCAAGCUAUGCAGGUGA | 17 | 1585 |
| CCR5-1233 | − | GCAGGUGACAGAGACUC | 17 | 1586 |
| CCR5-1234 | − | CAGGUGACAGAGACUCU | 17 | 1587 |
| CCR5-1235 | − | CAUCAUCUAUGCCUUUG | 17 | 1588 |
| CCR5-1236 | − | AUCAUCUAUGCCUUUGU | 17 | 1589 |
| CCR5-1237 | − | UCAUCUAUGCCUUUGUC | 17 | 1590 |
| CCR5-1238 | − | CAUCUAUGCCUUUGUCG | 17 | 1591 |
| CCR5-1239 | − | UCUAUGCCUUUGUCGGG | 17 | 1592 |
| CCR5-1240 | − | UUUGUCGGGGAGAAGUU | 17 | 1593 |
| CCR5-1241 | − | CUGUUCUAUUUUCCAGC | 17 | 1594 |
| CCR5-1242 | − | UUUCCAGCAAGAGGCUC | 17 | 1595 |
| CCR5-1243 | − | CAGCAAGAGGCUCCCGA | 17 | 1596 |
| CCR5-1244 | − | AGUUUACACCCGAUCCA | 17 | 1597 |
| CCR5-1245 | − | GUUUACACCCGAUCCAC | 17 | 1598 |
| CCR5-1246 | − | UUUACACCCGAUCCACU | 17 | 1599 |
| CCR5-1247 | − | UUACACCCGAUCCACUG | 17 | 1600 |
| CCR5-1248 | − | CCCGAUCCACUGGGGAG | 17 | 1601 |
| CCR5-1249 | − | CCGAUCCACUGGGGAGC | 17 | 1602 |
| CCR5-1250 | − | GGGAGCAGGAAAUAUCU | 17 | 1603 |
| CCR5-1251 | − | AUCUGUGGGCUUGUGAC | 17 | 1604 |
| CCR5-1252 | − | UUGUGACACGGACUCAA | 17 | 1605 |
| CCR5-1253 | − | UGGGCUGGUGACCCAGU | 17 | 1606 |
| CCR5-1254 | − | UAGUUUUCAUACACAGC | 17 | 1607 |
| CCR5-1255 | − | UUCAUACACAGCCUGGG | 17 | 1608 |
| CCR5-1256 | − | UCAUACACAGCCUGGGC | 17 | 1609 |
| CCR5-1257 | − | CAUACACAGCCUGGGCU | 17 | 1610 |
| CCR5-1258 | − | CACAGCCUGGGCUGGGG | 17 | 1611 |
| CCR5-1259 | − | ACAGCCUGGGCUGGGGG | 17 | 1612 |
| CCR5-1260 | − | CCUGGGCUGGGGGUGGG | 17 | 1613 |
| CCR5-1261 | − | CUGGGCUGGGGGUGGGG | 17 | 1614 |
| CCR5-1262 | − | UGGGCUGGGGGUGGGGU | 17 | 1615 |
| CCR5-1263 | − | GGCUGGGGGUGGGGUGG | 17 | 1616 |
| CCR5-1264 | − | GGAGAGGUCUUUUUUAA | 17 | 1617 |
| CCR5-1265 | − | GAGAGGUCUUUUUUAAA | 17 | 1618 |
| CCR5-1266 | − | AAAGGAAGUUACUGUUA | 17 | 1619 |
| CCR5-1267 | − | AGGAAGUUACUGUUAUA | 17 | 1620 |
| CCR5-1268 | − | UUUAAGCCCAUCAAUUA | 17 | 1621 |
| CCR5-1269 | − | CAAAUCAAAAUAUGUUG | 17 | 1622 |
| CCR5-1270 | − | CAAACUCUCCCUUCACU | 17 | 1623 |
| CCR5-1271 | − | UCCUUAUGUAUAUUUAA | 17 | 1624 |
| CCR5-1272 | − | UAUUUAAAAGAAAGCCU | 17 | 1625 |
| CCR5-1273 | − | UUUAAAAGAAAGCCUCA | 17 | 1626 |
| CCR5-1274 | − | CAGAGAAUUGCUGAUUC | 17 | 1627 |
| CCR5-1275 | − | UUCUUGAGUUUAGUGAU | 17 | 1628 |
| CCR5-1276 | − | GAGUUUAGUGAUCUGAA | 17 | 1629 |
| CCR5-1277 | − | AAAUACCAAAAUUAUUU | 17 | 1630 |
| CCR5-1278 | − | CAGGUCUUUGUCUUGCU | 17 | 1631 |
| CCR5-1279 | − | AGGUCUUUGUCUUGCUA | 17 | 1632 |
| CCR5-1280 | − | GGUCUUUGUCUUGCUAU | 17 | 1633 |
| CCR5-1281 | − | GUCUUUGUCUUGCUAUG | 17 | 1634 |
| CCR5-1282 | − | CUUUGUCUUGCUAUGGG | 17 | 1635 |
| CCR5-1283 | − | CUAUGGGGAGAAAAGAC | 17 | 1636 |
| CCR5-1284 | − | CAUGAAUAUGAUUAGUA | 17 | 1637 |
| CCR5-1285 | − | AAUAAGUUUCACUGACU | 17 | 1638 |
| CCR5-1286 | − | CACUGACUUAGAACCAG | 17 | 1639 |
| CCR5-1287 | − | CUGACUUAGAACCAGGC | 17 | 1640 |
| CCR5-1288 | − | GGCGAGAGACUUGUGGC | 17 | 1641 |
| CCR5-1289 | − | GCGAGAGACUUGUGGCC | 17 | 1642 |
| CCR5-1290 | − | CGAGAGACUUGUGGCCU | 17 | 1643 |
| CCR5-1291 | − | AGAGACUUGUGGCCUGG | 17 | 1644 |
| CCR5-1292 | − | CUUGUGGCCUGGGAGAG | 17 | 1645 |
| CCR5-1293 | − | UUGUGGCCUGGGAGAGC | 17 | 1646 |
| CCR5-1294 | − | UGUGGCCUGGGAGAGCU | 17 | 1647 |
| CCR5-1295 | − | GUGGCCUGGGAGAGCUG | 17 | 1648 |
| CCR5-1296 | − | CUGGGGAAGCUUCUUAA | 17 | 1649 |
| CCR5-1297 | − | GGGGAAGCUUCUUAAAU | 17 | 1650 |
| CCR5-1298 | − | GAAGCUUCUUAAAUGAG | 17 | 1651 |
| CCR5-1299 | − | AAGCUUCUUAAAUGAGA | 17 | 1652 |
| CCR5-1300 | − | CUUAAAUGAGAAGGAAU | 17 | 1653 |
| CCR5-1301 | − | AUGAGAAGGAAUUUGAG | 17 | 1654 |
| CCR5-1302 | − | UCUAUUGCUGGCAAAGA | 17 | 1655 |
| CCR5-1303 | − | CUCACUGCAAGCACUGC | 17 | 1656 |
| CCR5-1304 | − | AUGGGCAAGCUUGGCUG | 17 | 1657 |
| CCR5-1305 | − | GGCAAGCUUGGCUGUAG | 17 | 1658 |
| CCR5-1306 | − | GCAAGCUUGGCUGUAGA | 17 | 1659 |
| CCR5-1307 | − | UUGGCUGUAGAAGGAGA | 17 | 1660 |
| CCR5-1308 | − | GAAGGAGACAGAGCUGG | 17 | 1661 |
| CCR5-1309 | − | AAGGAGACAGAGCUGGU | 17 | 1662 |
| CCR5-1310 | − | AGGAGACAGAGCUGGUU | 17 | 1663 |
| CCR5-1311 | − | GAGCUGGUUGGGAAGAC | 17 | 1664 |
| CCR5-1312 | − | AGCUGGUUGGGAAGACA | 17 | 1665 |
| CCR5-1313 | − | GCUGGUUGGGAAGACAU | 17 | 1666 |
| CCR5-1314 | − | CUGGUUGGGAAGACAUG | 17 | 1667 |
| CCR5-1315 | − | GGUUGGGAAGACAUGGG | 17 | 1668 |
| CCR5-1316 | − | GUUGGGAAGACAUGGGG | 17 | 1669 |
| CCR5-1317 | − | GGGAAGACAUGGGGAGG | 17 | 1670 |
| CCR5-1318 | − | AAGGACAAGGCUAGAUC | 17 | 1671 |
| CCR5-1319 | − | GACAAGGCUAGAUCAUG | 17 | 1672 |
| CCR5-1320 | − | AUUGCUCCGUCUAAGUC | 17 | 1673 |
| CCR5-1321 | − | UCCGUCUAAGUCAUGAG | 17 | 1674 |
| CCR5-1322 | − | CUAAGUCAUGAGCUGAG | 17 | 1675 |
| CCR5-1323 | − | UAAGUCAUGAGCUGAGC | 17 | 1676 |
| CCR5-1324 | − | AAGUCAUGAGCUGAGCA | 17 | 1677 |
| CCR5-1325 | − | GAUCCUGGUUGGUGUUG | 17 | 1678 |
| CCR5-1326 | − | GGUUUACUCUGUGGCCA | 17 | 1679 |
| CCR5-1327 | − | GUUUACUCUGUGGCCAA | 17 | 1680 |
| CCR5-1328 | − | UUACUCUGUGGCCAAAG | 17 | 1681 |
| CCR5-1329 | − | UGUGGCCAAAGGAGGGU | 17 | 1682 |
| CCR5-1330 | − | GUGGCCAAAGGAGGGUC | 17 | 1683 |
| CCR5-1331 | − | GCCAAAGGAGGGUCAGG | 17 | 1684 |
| CCR5-1332 | − | AAGGAGGGUCAGGAAGG | 17 | 1685 |
| CCR5-1333 | − | CAGGAAGGAUGAGCAUU | 17 | 1686 |
| CCR5-1334 | − | GGAUGAGCAUUUAGGGC | 17 | 1687 |
| CCR5-1335 | − | GAUGAGCAUUUAGGGCA | 17 | 1688 |
| CCR5-1336 | − | ACCAACAGCCCUCAGGU | 17 | 1689 |
| CCR5-1337 | − | ACAGCCCUCAGGUCAGG | 17 | 1690 |
| CCR5-1338 | − | AGCCCUCAGGUCAGGGU | 17 | 1691 |
| CCR5-1339 | − | UCUGCUAAGCUCAAGGC | 17 | 1692 |
| CCR5-1340 | − | UGCUAAGCUCAAGGCGU | 17 | 1693 |
| CCR5-1341 | − | AAGCUCAAGGCGUGAGG | 17 | 1694 |
| CCR5-1342 | − | AGCUCAAGGCGUGAGGA | 17 | 1695 |
| CCR5-1343 | − | GCUCAAGGCGUGAGGAU | 17 | 1696 |
| CCR5-1344 | − | CAAGGCGUGAGGAUGGG | 17 | 1697 |
| CCR5-1345 | − | AAGGCGUGAGGAUGGGA | 17 | 1698 |
| CCR5-1346 | − | GGCGUGAGGAUGGGAAG | 17 | 1699 |
| CCR5-1347 | − | GCGUGAGGAUGGGAAGG | 17 | 1700 |
| CCR5-1348 | − | CGUGAGGAUGGGAAGGA | 17 | 1701 |
| CCR5-1349 | − | AGGAGGGAGGUAUUCGU | 17 | 1702 |
| CCR5-1350 | − | GGGAGGUAUUCGUAAGG | 17 | 1703 |
| CCR5-1351 | − | GGAGGUAUUCGUAAGGA | 17 | 1704 |
| CCR5-1352 | − | GAGGUAUUCGUAAGGAU | 17 | 1705 |
| CCR5-1353 | − | GUAUUCGUAAGGAUGGG | 17 | 1706 |
| CCR5-1354 | − | UAUUCGUAAGGAUGGGA | 17 | 1707 |
| CCR5-1355 | − | UUCGUAAGGAUGGGAAG | 17 | 1708 |
| CCR5-1356 | − | UCGUAAGGAUGGGAAGG | 17 | 1709 |
| CCR5-1357 | − | CGUAAGGAUGGGAAGGA | 17 | 1710 |
| CCR5-1358 | − | AGGUAUUCGUGCAGCAU | 17 | 1711 |
| CCR5-1359 | − | GUAUUCGUGCAGCAUAU | 17 | 1712 |
| CCR5-1360 | − | UGCAGCAUAUGAGGAUG | 17 | 1713 |
| CCR5-1361 | − | UGAGGAUGCAGAGUCAG | 17 | 1714 |
| CCR5-1362 | − | AUGCAGAGUCAGCAGAA | 17 | 1715 |
| CCR5-1363 | − | UGCAGAGUCAGCAGAAC | 17 | 1716 |
| CCR5-1364 | − | GAGUCAGCAGAACUGGG | 17 | 1717 |
| CCR5-1365 | − | GCAGAACUGGGGUGGAU | 17 | 1718 |
| CCR5-1366 | − | ACUGGGGUGGAUUUGGG | 17 | 1719 |
| CCR5-1367 | − | CUGGGGUGGAUUUGGGU | 17 | 1720 |
| CCR5-1368 | − | GUGGAUUUGGGUUGGAA | 17 | 1721 |
| CCR5-1369 | − | GGAUUUGGGUUGGAAGU | 17 | 1722 |
| CCR5-1370 | − | GGGUUGGAAGUGAGGGU | 17 | 1723 |
| CCR5-1371 | − | GUUGGAAGUGAGGGUCA | 17 | 1724 |
| CCR5-1372 | − | UGGAAGUGAGGGUCAGA | 17 | 1725 |
| CCR5-1373 | − | GGAAGUGAGGGUCAGAG | 17 | 1726 |
| CCR5-1374 | − | GAGGGUCAGAGAGGAGU | 17 | 1727 |
| CCR5-1375 | − | GGGUCAGAGAGGAGUCA | 17 | 1728 |
| CCR5-1376 | − | GUCAGAGAGGAGUCAGA | 17 | 1729 |
| CCR5-1377 | − | CCUAGUCUUCAAGCAGA | 17 | 1730 |
| CCR5-1378 | − | CUAGUCUUCAAGCAGAU | 17 | 1731 |
| CCR5-1379 | − | AGUCUUCAAGCAGAUUG | 17 | 1732 |
| CCR5-1380 | − | GCAGAUUGGAGAAACCC | 17 | 1733 |
| CCR5-1381 | − | UGAAAAGACAUCAAGCA | 17 | 1734 |
| CCR5-1382 | − | AAAGACAUCAAGCACAG | 17 | 1735 |
| CCR5-1383 | − | AAGACAUCAAGCACAGA | 17 | 1736 |
| CCR5-1384 | − | GACAUCAAGCACAGAAG | 17 | 1737 |
| CCR5-1385 | − | ACAUCAAGCACAGAAGG | 17 | 1738 |
| CCR5-1386 | − | AUCAAGCACAGAAGGAG | 17 | 1739 |
| CCR5-1387 | − | UCAAGCACAGAAGGAGG | 17 | 1740 |
| CCR5-1388 | − | AAGCACAGAAGGAGGAG | 17 | 1741 |
| CCR5-1389 | − | AGCACAGAAGGAGGAGG | 17 | 1742 |
| CCR5-1390 | − | AGGAGGAGGUUUAGGUC | 17 | 1743 |
| CCR5-1391 | − | AGGAGGUUUAGGUCAAG | 17 | 1744 |
| CCR5-1392 | − | UUUAGGUCAAGAAGAAG | 17 | 1745 |
| CCR5-1393 | − | AAGAUGGAUUGGUGUAA | 17 | 1746 |
| CCR5-1394 | − | UGGAUUGGUGUAAAAGG | 17 | 1747 |
| CCR5-1395 | − | AGGAUGGGUCUGGUUUG | 17 | 1748 |
| CCR5-1396 | − | GGUCUGGUUUGCAGAGC | 17 | 1749 |
| CCR5-1397 | − | CUCCAGGCUGUCUUUCA | 17 | 1750 |
| CCR5-1398 | − | UUUCCUUCCCAUCCCAG | 17 | 1751 |
| CCR5-1399 | − | CCAUCCCAGCUGAAAUA | 17 | 1752 |
| CCR5-1400 | − | AUCCCAGCUGAAAUACU | 17 | 1753 |
| CCR5-1401 | − | UCCCAGCUGAAAUACUG | 17 | 1754 |
| CCR5-1402 | − | AAAUACUGAGGGGUCUC | 17 | 1755 |
| CCR5-1403 | − | AAUACUGAGGGGUCUCC | 17 | 1756 |
| CCR5-1404 | − | UACUGAGGGGUCUCCAG | 17 | 1757 |
| CCR5-1405 | − | ACUGAGGGGUCUCCAGG | 17 | 1758 |
| CCR5-1406 | − | AGGAGGAGACUAGAUUU | 17 | 1759 |
| CCR5-1407 | − | ACUAGAUUUAUGAAUAC | 17 | 1760 |
| CCR5-1408 | − | UUAUGAAUACACGAGGU | 17 | 1761 |
| CCR5-1409 | − | ACACGAGGUAUGAGGUC | 17 | 1762 |
| CCR5-1410 | − | CACGAGGUAUGAGGUCU | 17 | 1763 |
| CCR5-1411 | − | CAUACUUCAGCUCACAC | 17 | 1764 |
| CCR5-1412 | − | UCACACAUGAGAUCUAG | 17 | 1765 |
| CCR5-1413 | − | ACACAUGAGAUCUAGGU | 17 | 1766 |
| CCR5-1414 | − | UACCUAGUAGUCAUUUC | 17 | 1767 |
| CCR5-1415 | − | AGUCAUUUCAUGGGUUG | 17 | 1768 |
| CCR5-1416 | − | GUCAUUUCAUGGGUUGU | 17 | 1769 |
| CCR5-1417 | − | UCAUUUCAUGGGUUGUU | 17 | 1770 |
| CCR5-1418 | − | AUUUCAUGGGUUGUUGG | 17 | 1771 |
| CCR5-1419 | − | GUUGUUGGGAGGAUUCU | 17 | 1772 |
| CCR5-1420 | − | ACUCUUAGUUACUCAUU | 17 | 1773 |
| CCR5-1421 | − | CUCUUAGUUACUCAUUC | 17 | 1774 |
| CCR5-1422 | − | CUCAUUCAGGGAUAGCA | 17 | 1775 |
| CCR5-1423 | − | UAGCACUGAGCAAAGCA | 17 | 1776 |
| CCR5-1424 | − | GAGCAAAGCAUUGAGCA | 17 | 1777 |
| CCR5-1425 | − | AGCAAAGCAUUGAGCAA | 17 | 1778 |
| CCR5-1426 | − | UGAGCAAAGGGGUCCCA | 17 | 1779 |
| CCR5-1427 | − | AAAGGGGUCCCAUAGAG | 17 | 1780 |
| CCR5-1428 | − | AGGGGUCCCAUAGAGGU | 17 | 1781 |
| CCR5-1429 | − | GGGGUCCCAUAGAGGUG | 17 | 1782 |
| CCR5-1430 | − | GGGUCCCAUAGAGGUGA | 17 | 1783 |
| CCR5-1431 | − | AUAGAGGUGAGGGAAGC | 17 | 1784 |
| CCR5-1432 | − | UUAACCGUCAAUAGGCA | 17 | 1785 |
| CCR5-1433 | − | UAACCGUCAAUAGGCAA | 17 | 1786 |
| CCR5-1434 | − | AACCGUCAAUAGGCAAA | 17 | 1787 |
| CCR5-1435 | − | ACCGUCAAUAGGCAAAG | 17 | 1788 |
| CCR5-1436 | − | CCGUCAAUAGGCAAAGG | 17 | 1789 |
| CCR5-1437 | − | CGUCAAUAGGCAAAGGG | 17 | 1790 |
| CCR5-1438 | − | CAAUAGGCAAAGGGGGG | 17 | 1791 |
| CCR5-1439 | − | AAUAGGCAAAGGGGGGA | 17 | 1792 |
| CCR5-1440 | − | GGAAGGGACAUAUUCAU | 17 | 1793 |
| CCR5-1441 | − | GAAGGGACAUAUUCAUU | 17 | 1794 |
| CCR5-1442 | − | UUUGGAAAUAAGCUGCC | 17 | 1795 |
| CCR5-1443 | − | AGCCUCCGUAUUUCAGA | 17 | 1796 |
| CCR5-1444 | − | UCCGUAUUUCAGACUGA | 17 | 1797 |
| CCR5-1445 | − | CCGUAUUUCAGACUGAA | 17 | 1798 |
| CCR5-1446 | − | CGUAUUUCAGACUGAAU | 17 | 1799 |
| CCR5-1447 | − | UUUCAGACUGAAUGGGG | 17 | 1800 |
| CCR5-1448 | − | UUCAGACUGAAUGGGGG | 17 | 1801 |
| CCR5-1449 | − | UCAGACUGAAUGGGGGU | 17 | 1802 |
| CCR5-1450 | − | CAGACUGAAUGGGGGUG | 17 | 1803 |
| CCR5-1451 | − | AGACUGAAUGGGGGUGG | 17 | 1804 |
| CCR5-1452 | − | GACUGAAUGGGGGUGGG | 17 | 1805 |
| CCR5-1453 | − | GCCUUCUCCAGACAAAC | 17 | 1806 |
| CCR5-1454 | − | AGACAAACCAGAAGCAA | 17 | 1807 |
| CCR5-1455 | − | AUCGUCUCUCCCUCCCU | 17 | 1808 |
| CCR5-1456 | − | CUCUCCCUCCCUUUGAA | 17 | 1809 |
| CCR5-1457 | − | AAUAUACCCCUUAGUGU | 17 | 1810 |
| CCR5-1458 | − | UGGGUAUAUUCAUUUCA | 17 | 1811 |
| CCR5-1459 | − | GGGUAUAUUCAUUUCAA | 17 | 1812 |
| CCR5-1460 | − | GGUAUAUUCAUUUCAAA | 17 | 1813 |
| CCR5-1461 | − | UAUAUUCAUUUCAAAGG | 17 | 1814 |
| CCR5-1462 | − | UAUUCAUUUCAAAGGGA | 17 | 1815 |
| CCR5-1463 | − | UUCAUUUCAAAGGGAGA | 17 | 1816 |
| CCR5-1464 | − | CAUUUCAAAGGGAGAGA | 17 | 1817 |
| CCR5-1465 | − | UAUGAUUGUGCACAUAC | 17 | 1818 |
| CCR5-1466 | − | ACAUACUUGAGACUGUU | 17 | 1819 |
| CCR5-1467 | − | UUGAGACUGUUUUGAAU | 17 | 1820 |
| CCR5-1468 | − | UGAGACUGUUUUGAAUU | 17 | 1821 |
| CCR5-1469 | − | GAGACUGUUUUGAAUUU | 17 | 1822 |
| CCR5-1470 | − | AGACUGUUUUGAAUUUG | 17 | 1823 |
| CCR5-1471 | − | AUCAUAGUACAGGUAAG | 17 | 1824 |
| CCR5-1472 | − | CAUAGUACAGGUAAGGU | 17 | 1825 |
| CCR5-1473 | − | AUAGUACAGGUAAGGUG | 17 | 1826 |
| CCR5-1474 | − | UAGUACAGGUAAGGUGA | 17 | 1827 |
| CCR5-1475 | − | UGAGGGAAUAGUAAGUG | 17 | 1828 |
| CCR5-1476 | − | AGGGAAUAGUAAGUGGU | 17 | 1829 |
| CCR5-1477 | − | AAGUGGUGAGAACUACU | 17 | 1830 |
| CCR5-1478 | − | AGUGGUGAGAACUACUC | 17 | 1831 |
| CCR5-1479 | − | GUGGUGAGAACUACUCA | 17 | 1832 |
| CCR5-1480 | − | UGAGAACUACUCAGGGA | 17 | 1833 |
| CCR5-1481 | − | UCAGGGAAUGAAGGUGU | 17 | 1834 |
| CCR5-1482 | − | GAAGGUGUCAGAAUAAU | 17 | 1835 |
| CCR5-1483 | − | ACUGACUUUCUCAGCCU | 17 | 1836 |
| CCR5-1484 | − | UUUCUCAGCCUCUGAAU | 17 | 1837 |
| CCR5-1485 | − | GCCUCUGAAUAUGAACG | 17 | 1838 |
| CCR5-1486 | − | AGCAUUGUGGCUGUCAG | 17 | 1839 |
| CCR5-1487 | − | GCAUUGUGGCUGUCAGC | 17 | 1840 |
| CCR5-1488 | − | GCUGUCAGCAGGAAGCA | 17 | 1841 |
| CCR5-1489 | − | GUCAGCAGGAAGCAACG | 17 | 1842 |
| CCR5-1490 | − | UCAGCAGGAAGCAACGA | 17 | 1843 |
| CCR5-1491 | − | CAGCAGGAAGCAACGAA | 17 | 1844 |
| CCR5-1492 | − | CCUUUUGCUCUUAAGUU | 17 | 1845 |
| CCR5-1493 | − | CUUUUGCUCUUAAGUUG | 17 | 1846 |
| CCR5-1494 | − | UUUGCUCUUAAGUUGUG | 17 | 1847 |
| CCR5-1495 | − | AGAGUGCAACAGUAGCA | 17 | 1848 |
| CCR5-1496 | − | GCAUAGGACCCUACCCU | 17 | 1849 |
| CCR5-1497 | − | UGCAUAUUCUUAUGUAU | 17 | 1850 |
| CCR5-1498 | − | UGAAAGUUACAAAUUGC | 17 | 1851 |
| CCR5-1499 | − | AGUUACAAAUUGCUUGA | 17 | 1852 |
| CCR5-1500 | + | UUUGUAACUUUCACAUACAU | 20 | 1853 |
| CCR5-1501 | + | AUAUGCAAAUACUAAGAUGU | 20 | 1854 |
| CCR5-1502 | + | AGAAUGUCUUUGACUUGGCC | 20 | 1855 |
| CCR5-1503 | + | AAUGUCUUUGACUUGGCCCA | 20 | 1856 |
| CCR5-1504 | + | CUUUGACUUGGCCCAGAGGG | 20 | 1857 |
| CCR5-1505 | + | UGUUGCACUCUCCACAACUU | 20 | 1858 |
| CCR5-1506 | + | UCUCCACAACUUAAGAGCAA | 20 | 1859 |
| CCR5-1507 | + | CUCCACAACUUAAGAGCAAA | 20 | 1860 |
| CCR5-1508 | + | CAAUGCUCACCGUUCAUAUU | 20 | 1861 |
| CCR5-1509 | + | UCACCGUUCAUAUUCAGAGG | 20 | 1862 |
| CCR5-1510 | + | ACCGUUCAUAUUCAGAGGCU | 20 | 1863 |
| CCR5-1511 | + | UAUUCUGACACCUUCAUUCC | 20 | 1864 |
| CCR5-1512 | + | UCAAGUAUGUGCACAAUCAU | 20 | 1865 |
| CCR5-1513 | + | AUGUGCACAAUCAUAUGAGA | 20 | 1866 |
| CCR5-1514 | + | CACAAUCAUAUGAGACAGAA | 20 | 1867 |
| CCR5-1515 | + | AAAAACCUCUCUCUCUCCCU | 20 | 1868 |
| CCR5-1516 | + | CCUCUCUCUCUCCCUUUGAA | 20 | 1869 |
| CCR5-1517 | + | AAUGAAUAUACCCAAACACU | 20 | 1870 |
| CCR5-1518 | + | AUGAAUAUACCCAAACACUA | 20 | 1871 |
| CCR5-1519 | + | UAAGGGGUAUAUUCAUUUCA | 20 | 1872 |
| CCR5-1520 | + | AAGGGGUAUAUUCAUUUCAA | 20 | 1873 |
| CCR5-1521 | + | AGGGGUAUAUUCAUUUCAAA | 20 | 1874 |
| CCR5-1522 | + | GGGUAUAUUCAUUUCAAAGG | 20 | 1875 |
| CCR5-1523 | + | GGUAUAUUCAUUUCAAAGGG | 20 | 1876 |
| CCR5-1524 | + | GUAUAUUCAUUUCAAAGGGA | 20 | 1877 |
| CCR5-1525 | + | AUAUUCAUUUCAAAGGGAGG | 20 | 1878 |
| CCR5-1526 | + | UUCUGUUGCUUCUGGUUUGU | 20 | 1879 |
| CCR5-1527 | + | UCUGUUGCUUCUGGUUUGUC | 20 | 1880 |
| CCR5-1528 | + | UGUUGCUUCUGGUUUGUCUG | 20 | 1881 |
| CCR5-1529 | + | GGUUUGUCUGGAGAAGGCAU | 20 | 1882 |
| CCR5-1530 | + | GUUUGUCUGGAGAAGGCAUC | 20 | 1883 |
| CCR5-1531 | + | CCCCCCCACCCCCAUUCAGU | 20 | 1884 |
| CCR5-1532 | + | ACCCCCAUUCAGUCUGAAAU | 20 | 1885 |
| CCR5-1533 | + | CCCCCAUUCAGUCUGAAAUA | 20 | 1886 |
| CCR5-1534 | + | GGCUGGUAAAUUGUACUUUU | 20 | 1887 |
| CCR5-1535 | + | UCAAGGCAGCUUAUUUCCAA | 20 | 1888 |
| CCR5-1536 | + | UGCCUAUUGACGGUUAAAUG | 20 | 1889 |
| CCR5-1537 | + | GAUACCUACACUUGUGUGCA | 20 | 1890 |
| CCR5-1538 | + | UUCAGGCUUCCCUCACCUCU | 20 | 1891 |
| CCR5-1539 | + | UCAGGCUUCCCUCACCUCUA | 20 | 1892 |
| CCR5-1540 | + | UGCUUUGCUCAGUGCUAUCC | 20 | 1893 |
| CCR5-1541 | + | UUGCUCAGUGCUAUCCCUGA | 20 | 1894 |
| CCR5-1542 | + | CUAUCCCUGAAUGAGUAACU | 20 | 1895 |
| CCR5-1543 | + | AACUAAGAGUUUGAUGCUUA | 20 | 1896 |
| CCR5-1544 | + | UGCUGCCUGUGGUUGCCUCA | 20 | 1897 |
| CCR5-1545 | + | UAGAAUCCUCCCAACAACCC | 20 | 1898 |
| CCR5-1546 | + | UCCUCACCUAGAUCUCAUGU | 20 | 1899 |
| CCR5-1547 | + | ACCUAGAUCUCAUGUGUGAG | 20 | 1900 |
| CCR5-1548 | + | UUCAUAAAUCUAGUCUCCUC | 20 | 1901 |
| CCR5-1549 | + | UCAUAAAUCUAGUCUCCUCC | 20 | 1902 |
| CCR5-1550 | + | GAGACCCCUCAGUAUUUCAG | 20 | 1903 |
| CCR5-1551 | + | AGACCCCUCAGUAUUUCAGC | 20 | 1904 |
| CCR5-1552 | + | CCCUCAGUAUUUCAGCUGGG | 20 | 1905 |
| CCR5-1553 | + | CCUCAGUAUUUCAGCUGGGA | 20 | 1906 |
| CCR5-1554 | + | CUCAGUAUUUCAGCUGGGAU | 20 | 1907 |
| CCR5-1555 | + | AGUAUUUCAGCUGGGAUGGG | 20 | 1908 |
| CCR5-1556 | + | GUAUUUCAGCUGGGAUGGGA | 20 | 1909 |
| CCR5-1557 | + | CUGGGAUGGGAAGGAAAUCU | 20 | 1910 |
| CCR5-1558 | + | GGGAAGGAAAUCUAUGAAGU | 20 | 1911 |
| CCR5-1559 | + | UAUGAAGUCAGAAGCAUUCA | 20 | 1912 |
| CCR5-1560 | + | AGCAUUCAGUGAAAGACAGC | 20 | 1913 |
| CCR5-1561 | + | GCAUUCAGUGAAAGACAGCC | 20 | 1914 |
| CCR5-1562 | + | AGUGAAAGACAGCCUGGAGU | 20 | 1915 |
| CCR5-1563 | + | AAAGACAGCCUGGAGUCUGG | 20 | 1916 |
| CCR5-1564 | + | UCUGUGCUUGAUGUCUUUUC | 20 | 1917 |
| CCR5-1565 | + | CAAGGGUUUCUCCAAUCUGC | 20 | 1918 |
| CCR5-1566 | + | UCUCCAAUCUGCUUGAAGAC | 20 | 1919 |
| CCR5-1567 | + | CUCCAAUCUGCUUGAAGACU | 20 | 1920 |
| CCR5-1568 | + | UCUGCAUCCUCAUAUGCUGC | 20 | 1921 |
| CCR5-1569 | + | CCUCCCUCCUUCCCAUCCUU | 20 | 1922 |
| CCR5-1570 | + | CUCCUUCCCAUCCUCACGCC | 20 | 1923 |
| CCR5-1571 | + | UCCUCACGCCUUGAGCUUAG | 20 | 1924 |
| CCR5-1572 | + | GAGGCCAUCCUCACCCUGAC | 20 | 1925 |
| CCR5-1573 | + | GGCCAUCCUCACCCUGACCU | 20 | 1926 |
| CCR5-1574 | + | UCCUGACCCUCCUUUGGCCA | 20 | 1927 |
| CCR5-1575 | + | AAACCUUCUGCAACACCAAC | 20 | 1928 |
| CCR5-1576 | + | CUGCUCAGCUCAUGACUUAG | 20 | 1929 |
| CCR5-1577 | + | UGCUCAGCUCAUGACUUAGA | 20 | 1930 |
| CCR5-1578 | + | UUGCCCAUGCAGUGCUUGCA | 20 | 1931 |
| CCR5-1579 | + | ACUCAAAUUCCUUCUCAUUU | 20 | 1932 |
| CCR5-1580 | + | UCUCGCCUGGUUCUAAGUCA | 20 | 1933 |
| CCR5-1581 | + | UGAAACUUAUUAACCAUACC | 20 | 1934 |
| CCR5-1582 | + | GAAACUUAUUAACCAUACCU | 20 | 1935 |
| CCR5-1583 | + | AACUUAUUAACCAUACCUUG | 20 | 1936 |
| CCR5-1584 | + | ACUUAUUAACCAUACCUUGG | 20 | 1937 |
| CCR5-1585 | + | CUUAUUAACCAUACCUUGGA | 20 | 1938 |
| CCR5-1586 | + | UUAUUAACCAUACCUUGGAG | 20 | 1939 |
| CCR5-1587 | + | CCUUGGAGGGGAAAUCACAC | 20 | 1940 |
| CCR5-1588 | + | AGGUAAAAAGUUGUACAUUU | 20 | 1941 |
| CCR5-1589 | + | CUGUUCAGAUCACUAAACUC | 20 | 1942 |
| CCR5-1590 | + | ACUCAAGAAUCAGCAAUUCU | 20 | 1943 |
| CCR5-1591 | + | GCUUUCUUUUAAAUAUACAU | 20 | 1944 |
| CCR5-1592 | + | CUUUCUUUUAAAUAUACAUA | 20 | 1945 |
| CCR5-1593 | + | UAAAUAUACAUAAGGAACUU | 20 | 1946 |
| CCR5-1594 | + | AAAUAUACAUAAGGAACUUU | 20 | 1947 |
| CCR5-1595 | + | AUACAUAAGGAACUUUCGGA | 20 | 1948 |
| CCR5-1596 | + | CAUAAGGAACUUUCGGAGUG | 20 | 1949 |
| CCR5-1597 | + | AUAAGGAACUUUCGGAGUGA | 20 | 1950 |
| CCR5-1598 | + | UAAGGAACUUUCGGAGUGAA | 20 | 1951 |
| CCR5-1599 | + | AGGAACUUUCGGAGUGAAGG | 20 | 1952 |
| CCR5-1600 | + | UUGUCAAUAACUUGAUGCAU | 20 | 1953 |
| CCR5-1601 | + | UCAAUAACUUGAUGCAUGUG | 20 | 1954 |
| CCR5-1602 | + | CAAUAACUUGAUGCAUGUGA | 20 | 1955 |
| CCR5-1603 | + | AAUAACUUGAUGCAUGUGAA | 20 | 1956 |
| CCR5-1604 | + | AUAACUUGAUGCAUGUGAAG | 20 | 1957 |
| CCR5-1605 | + | GAUUUGGCUUUCUAUAAUUG | 20 | 1958 |
| CCR5-1606 | + | UUUAAACAGAUGCCAAAUAA | 20 | 1959 |
| CCR5-1607 | + | AACAGAUGCCAAAUAAAUGG | 20 | 1960 |
| CCR5-1608 | + | ACCCCCAGCCCAGGCUGUGU | 20 | 1961 |
| CCR5-1609 | + | AGCCAUGUGCACAACUCUGA | 20 | 1962 |
| CCR5-1610 | + | UGACUGGGUCACCAGCCCAC | 20 | 1963 |
| CCR5-1611 | + | CAGAUAUUUCCUGCUCCCCA | 20 | 1964 |
| CCR5-1612 | + | AUUUCCUGCUCCCCAGUGGA | 20 | 1965 |
| CCR5-1613 | + | CCCAGUGGAUCGGGUGUAAA | 20 | 1966 |
| CCR5-1614 | + | UGUAAACUGAGCUUGCUCGC | 20 | 1967 |
| CCR5-1615 | + | GUAAACUGAGCUUGCUCGCU | 20 | 1968 |
| CCR5-1616 | + | UAAACUGAGCUUGCUCGCUC | 20 | 1969 |
| CCR5-1617 | + | GCUCGCUCGGGAGCCUCUUG | 20 | 1970 |
| CCR5-1618 | + | CUCGCUCGGGAGCCUCUUGC | 20 | 1971 |
| CCR5-1619 | + | GGGAGCCUCUUGCUGGAAAA | 20 | 1972 |
| CCR5-1620 | + | GGAAAAUAGAACAGCAUUUG | 20 | 1973 |
| CCR5-1621 | + | AAGCGUUUGGCAAUGUGCUU | 20 | 1974 |
| CCR5-1622 | + | AGCGUUUGGCAAUGUGCUUU | 20 | 1975 |
| CCR5-1623 | + | GUUUGGCAAUGUGCUUUUGG | 20 | 1976 |
| CCR5-1624 | + | UGUGCUUUUGGAAGAAGACU | 20 | 1977 |
| CCR5-1625 | + | AGAAGACUAAGAGGUAGUUU | 20 | 1978 |
| CCR5-1626 | + | CCCCGACAAAGGCAUAGAUG | 20 | 1979 |
| CCR5-1627 | + | CCCGACAAAGGCAUAGAUGA | 20 | 1980 |
| CCR5-1628 | + | AUGCAGCAGUGCGUCAUCCC | 20 | 1981 |
| CCR5-1629 | + | CAUAGCUUGGUCCAACCUGU | 20 | 1982 |
| CCR5-1630 | + | UACUGCAAUUAUUCAGGCCA | 20 | 1983 |
| CCR5-1631 | + | UUAUUCAGGCCAAAGAAUUC | 20 | 1984 |
| CCR5-1632 | + | UAUUCAGGCCAAAGAAUUCC | 20 | 1985 |
| CCR5-1633 | + | AAGAAUUCCUGGAAGGUGUU | 20 | 1986 |
| CCR5-1634 | + | AGAAUUCCUGGAAGGUGUUC | 20 | 1987 |
| CCR5-1635 | + | AAUUCCUGGAAGGUGUUCAG | 20 | 1988 |
| CCR5-1636 | + | UCCUGGAAGGUGUUCAGGAG | 20 | 1989 |
| CCR5-1637 | + | UCAGGAGAAGGACAAUGUUG | 20 | 1990 |
| CCR5-1638 | + | CAGGAGAAGGACAAUGUUGU | 20 | 1991 |
| CCR5-1639 | + | AGGAGAAGGACAAUGUUGUA | 20 | 1992 |
| CCR5-1640 | + | GGACAAUGUUGUAGGGAGCC | 20 | 1993 |
| CCR5-1641 | + | CAAUGUUGUAGGGAGCCCAG | 20 | 1994 |
| CCR5-1642 | + | AUGUUGUAGGGAGCCCAGAA | 20 | 1995 |
| CCR5-1643 | + | GAAAAUAAACAAUCAUGAUG | 20 | 1996 |
| CCR5-1644 | + | CUCUUCUUCUCAUUUCGACA | 20 | 1997 |
| CCR5-1645 | + | UUCUCAUUUCGACACCGAAG | 20 | 1998 |
| CCR5-1646 | + | CGACACCGAAGCAGAGUUUU | 20 | 1999 |
| CCR5-1647 | + | AAGCAGAGUUUUUAGGAUUC | 20 | 2000 |
| CCR5-1648 | + | AUGACCAUGACAAGCAGCGG | 20 | 2001 |
| CCR5-1649 | + | AAGAUGACUAUCUUUAAUGU | 20 | 2002 |
| CCR5-1650 | + | AGAUGACUAUCUUUAAUGUC | 20 | 2003 |
| CCR5-1651 | + | UUAAUGUCUGGAAAUUCUUC | 20 | 2004 |
| CCR5-1652 | + | CCAGAAUUGAUACUGACUGU | 20 | 2005 |
| CCR5-1653 | + | CAGAAUUGAUACUGACUGUA | 20 | 2006 |
| CCR5-1654 | + | UGAUACUGACUGUAUGGAAA | 20 | 2007 |
| CCR5-1655 | + | AUACUGACUGUAUGGAAAAU | 20 | 2008 |
| CCR5-1656 | + | AAAUGAGAGCUGCAGGUGUA | 20 | 2009 |
| CCR5-1657 | + | GUGUAAUGAAGACCUUCUUU | 20 | 2010 |
| CCR5-1658 | + | GUAACUUUCACAUACAU | 17 | 2011 |
| CCR5-1659 | + | UGCAAAUACUAAGAUGU | 17 | 2012 |
| CCR5-1660 | + | AUGUCUUUGACUUGGCC | 17 | 2013 |
| CCR5-1661 | + | GUCUUUGACUUGGCCCA | 17 | 2014 |
| CCR5-1662 | + | UGACUUGGCCCAGAGGG | 17 | 2015 |
| CCR5-1663 | + | UGCACUCUCCACAACUU | 17 | 2016 |
| CCR5-1664 | + | CCACAACUUAAGAGCAA | 17 | 2017 |
| CCR5-1665 | + | CACAACUUAAGAGCAAA | 17 | 2018 |
| CCR5-1666 | + | UGCUCACCGUUCAUAUU | 17 | 2019 |
| CCR5-1667 | + | CCGUUCAUAUUCAGAGG | 17 | 2020 |
| CCR5-1668 | + | GUUCAUAUUCAGAGGCU | 17 | 2021 |
| CCR5-1669 | + | UCUGACACCUUCAUUCC | 17 | 2022 |
| CCR5-1670 | + | AGUAUGUGCACAAUCAU | 17 | 2023 |
| CCR5-1671 | + | UGCACAAUCAUAUGAGA | 17 | 2024 |
| CCR5-1672 | + | AAUCAUAUGAGACAGAA | 17 | 2025 |
| CCR5-1673 | + | AACCUCUCUCUCUCCCU | 17 | 2026 |
| CCR5-1674 | + | CUCUCUCUCCCUUUGAA | 17 | 2027 |
| CCR5-1675 | + | GAAUAUACCCAAACACU | 17 | 2028 |
| CCR5-1676 | + | AAUAUACCCAAACACUA | 17 | 2029 |
| CCR5-1677 | + | GGGGUAUAUUCAUUUCA | 17 | 2030 |
| CCR5-1678 | + | GGGUAUAUUCAUUUCAA | 17 | 2031 |
| CCR5-1679 | + | GGUAUAUUCAUUUCAAA | 17 | 2032 |
| CCR5-1680 | + | UAUAUUCAUUUCAAAGG | 17 | 2033 |
| CCR5-1681 | + | AUAUUCAUUUCAAAGGG | 17 | 2034 |
| CCR5-1682 | + | UAUUCAUUUCAAAGGGA | 17 | 2035 |
| CCR5-1683 | + | UUCAUUUCAAAGGGAGG | 17 | 2036 |
| CCR5-1684 | + | UGUUGCUUCUGGUUUGU | 17 | 2037 |
| CCR5-1685 | + | GUUGCUUCUGGUUUGUC | 17 | 2038 |
| CCR5-1686 | + | UGCUUCUGGUUUGUCUG | 17 | 2039 |
| CCR5-1687 | + | UUGUCUGGAGAAGGCAU | 17 | 2040 |
| CCR5-1688 | + | UGUCUGGAGAAGGCAUC | 17 | 2041 |
| CCR5-1689 | + | CCCCACCCCCAUUCAGU | 17 | 2042 |
| CCR5-1690 | + | CCCAUUCAGUCUGAAAU | 17 | 2043 |
| CCR5-1691 | + | CCAUUCAGUCUGAAAUA | 17 | 2044 |
| CCR5-1692 | + | UGGUAAAUUGUACUUUU | 17 | 2045 |
| CCR5-1693 | + | AGGCAGCUUAUUUCCAA | 17 | 2046 |
| CCR5-1694 | + | CUAUUGACGGUUAAAUG | 17 | 2047 |
| CCR5-1695 | + | ACCUACACUUGUGUGCA | 17 | 2048 |
| CCR5-1696 | + | AGGCUUCCCUCACCUCU | 17 | 2049 |
| CCR5-1697 | + | GGCUUCCCUCACCUCUA | 17 | 2050 |
| CCR5-1698 | + | UUUGCUCAGUGCUAUCC | 17 | 2051 |
| CCR5-1699 | + | CUCAGUGCUAUCCCUGA | 17 | 2052 |
| CCR5-1700 | + | UCCCUGAAUGAGUAACU | 17 | 2053 |
| CCR5-1701 | + | UAAGAGUUUGAUGCUUA | 17 | 2054 |
| CCR5-1702 | + | UGCCUGUGGUUGCCUCA | 17 | 2055 |
| CCR5-1703 | + | AAUCCUCCCAACAACCC | 17 | 2056 |
| CCR5-1704 | + | UCACCUAGAUCUCAUGU | 17 | 2057 |
| CCR5-1705 | + | UAGAUCUCAUGUGUGAG | 17 | 2058 |
| CCR5-1706 | + | AUAAAUCUAGUCUCCUC | 17 | 2059 |
| CCR5-1707 | + | UAAAUCUAGUCUCCUCC | 17 | 2060 |
| CCR5-1708 | + | ACCCCUCAGUAUUUCAG | 17 | 2061 |
| CCR5-1709 | + | CCCCUCAGUAUUUCAGC | 17 | 2062 |
| CCR5-1710 | + | UCAGUAUUUCAGCUGGG | 17 | 2063 |
| CCR5-1711 | + | CAGUAUUUCAGCUGGGA | 17 | 2064 |
| CCR5-1712 | + | AGUAUUUCAGCUGGGAU | 17 | 2065 |
| CCR5-1713 | + | AUUUCAGCUGGGAUGGG | 17 | 2066 |
| CCR5-1714 | + | UUUCAGCUGGGAUGGGA | 17 | 2067 |
| CCR5-1715 | + | GGAUGGGAAGGAAAUCU | 17 | 2068 |
| CCR5-1716 | + | AAGGAAAUCUAUGAAGU | 17 | 2069 |
| CCR5-1717 | + | GAAGUCAGAAGCAUUCA | 17 | 2070 |
| CCR5-1718 | + | AUUCAGUGAAAGACAGC | 17 | 2071 |
| CCR5-1719 | + | UUCAGUGAAAGACAGCC | 17 | 2072 |
| CCR5-1720 | + | GAAAGACAGCCUGGAGU | 17 | 2073 |
| CCR5-1721 | + | GACAGCCUGGAGUCUGG | 17 | 2074 |
| CCR5-1722 | + | GUGCUUGAUGUCUUUUC | 17 | 2075 |
| CCR5-1723 | + | GGGUUUCUCCAAUCUGC | 17 | 2076 |
| CCR5-1724 | + | CCAAUCUGCUUGAAGAC | 17 | 2077 |
| CCR5-1725 | + | CAAUCUGCUUGAAGACU | 17 | 2078 |
| CCR5-1726 | + | GCAUCCUCAUAUGCUGC | 17 | 2079 |
| CCR5-1727 | + | CCCUCCUUCCCAUCCUU | 17 | 2080 |
| CCR5-1728 | + | CUUCCCAUCCUCACGCC | 17 | 2081 |
| CCR5-1729 | + | UCACGCCUUGAGCUUAG | 17 | 2082 |
| CCR5-1730 | + | GCCAUCCUCACCCUGAC | 17 | 2083 |
| CCR5-1731 | + | CAUCCUCACCCUGACCU | 17 | 2084 |
| CCR5-1732 | + | UGACCCUCCUUUGGCCA | 17 | 2085 |
| CCR5-1733 | + | CCUUCUGCAACACCAAC | 17 | 2086 |
| CCR5-1734 | + | CUCAGCUCAUGACUUAG | 17 | 2087 |
| CCR5-1735 | + | UCAGCUCAUGACUUAGA | 17 | 2088 |
| CCR5-1736 | + | CCCAUGCAGUGCUUGCA | 17 | 2089 |
| CCR5-1737 | + | CAAAUUCCUUCUCAUUU | 17 | 2090 |
| CCR5-1738 | + | CGCCUGGUUCUAAGUCA | 17 | 2091 |
| CCR5-1739 | + | AACUUAUUAACCAUACC | 17 | 2092 |
| CCR5-1740 | + | ACUUAUUAACCAUACCU | 17 | 2093 |
| CCR5-1741 | + | UUAUUAACCAUACCUUG | 17 | 2094 |
| CCR5-1742 | + | UAUUAACCAUACCUUGG | 17 | 2095 |
| CCR5-1743 | + | AUUAACCAUACCUUGGA | 17 | 2096 |
| CCR5-1744 | + | UUAACCAUACCUUGGAG | 17 | 2097 |
| CCR5-1745 | + | UGGAGGGGAAAUCACAC | 17 | 2098 |
| CCR5-1746 | + | UAAAAAGUUGUACAUUU | 17 | 2099 |
| CCR5-1747 | + | UUCAGAUCACUAAACUC | 17 | 2100 |
| CCR5-1748 | + | CAAGAAUCAGCAAUUCU | 17 | 2101 |
| CCR5-1749 | + | UUCUUUUAAAUAUACAU | 17 | 2102 |
| CCR5-1750 | + | UCUUUUAAAUAUACAUA | 17 | 2103 |
| CCR5-1751 | + | AUAUACAUAAGGAACUU | 17 | 2104 |
| CCR5-1752 | + | UAUACAUAAGGAACUUU | 17 | 2105 |
| CCR5-1753 | + | CAUAAGGAACUUUCGGA | 17 | 2106 |
| CCR5-1754 | + | AAGGAACUUUCGGAGUG | 17 | 2107 |
| CCR5-1755 | + | AGGAACUUUCGGAGUGA | 17 | 2108 |
| CCR5-1756 | + | GGAACUUUCGGAGUGAA | 17 | 2109 |
| CCR5-1757 | + | AACUUUCGGAGUGAAGG | 17 | 2110 |
| CCR5-1758 | + | UCAAUAACUUGAUGCAU | 17 | 2111 |
| CCR5-1759 | + | AUAACUUGAUGCAUGUG | 17 | 2112 |
| CCR5-1760 | + | UAACUUGAUGCAUGUGA | 17 | 2113 |
| CCR5-1761 | + | AACUUGAUGCAUGUGAA | 17 | 2114 |
| CCR5-1762 | + | ACUUGAUGCAUGUGAAG | 17 | 2115 |
| CCR5-1763 | + | UUGGCUUUCUAUAAUUG | 17 | 2116 |
| CCR5-1764 | + | AAACAGAUGCCAAAUAA | 17 | 2117 |
| CCR5-1765 | + | AGAUGCCAAAUAAAUGG | 17 | 2118 |
| CCR5-1766 | + | CCCAGCCCAGGCUGUGU | 17 | 2119 |
| CCR5-1767 | + | CAUGUGCACAACUCUGA | 17 | 2120 |
| CCR5-1768 | + | CUGGGUCACCAGCCCAC | 17 | 2121 |
| CCR5-1769 | + | AUAUUUCCUGCUCCCCA | 17 | 2122 |
| CCR5-1770 | + | UCCUGCUCCCCAGUGGA | 17 | 2123 |
| CCR5-1771 | + | AGUGGAUCGGGUGUAAA | 17 | 2124 |
| CCR5-1772 | + | AAACUGAGCUUGCUCGC | 17 | 2125 |
| CCR5-1773 | + | AACUGAGCUUGCUCGCU | 17 | 2126 |
| CCR5-1774 | + | ACUGAGCUUGCUCGCUC | 17 | 2127 |
| CCR5-1775 | + | CGCUCGGGAGCCUCUUG | 17 | 2128 |
| CCR5-1776 | + | GCUCGGGAGCCUCUUGC | 17 | 2129 |
| CCR5-1777 | + | AGCCUCUUGCUGGAAAA | 17 | 2130 |
| CCR5-1778 | + | AAAUAGAACAGCAUUUG | 17 | 2131 |
| CCR5-1779 | + | CGUUUGGCAAUGUGCUU | 17 | 2132 |
| CCR5-1780 | + | GUUUGGCAAUGUGCUUU | 17 | 2133 |
| CCR5-1781 | + | UGGCAAUGUGCUUUUGG | 17 | 2134 |
| CCR5-1782 | + | GCUUUUGGAAGAAGACU | 17 | 2135 |
| CCR5-1783 | + | AGACUAAGAGGUAGUUU | 17 | 2136 |
| CCR5-1784 | + | CGACAAAGGCAUAGAUG | 17 | 2137 |
| CCR5-1785 | + | GACAAAGGCAUAGAUGA | 17 | 2138 |
| CCR5-1786 | + | CAGCAGUGCGUCAUCCC | 17 | 2139 |
| CCR5-1787 | + | AGCUUGGUCCAACCUGU | 17 | 2140 |
| CCR5-1788 | + | UGCAAUUAUUCAGGCCA | 17 | 2141 |
| CCR5-1789 | + | UUCAGGCCAAAGAAUUC | 17 | 2142 |
| CCR5-1790 | + | UCAGGCCAAAGAAUUCC | 17 | 2143 |
| CCR5-1791 | + | AAUUCCUGGAAGGUGUU | 17 | 2144 |
| CCR5-1792 | + | AUUCCUGGAAGGUGUUC | 17 | 2145 |
| CCR5-1793 | + | UCCUGGAAGGUGUUCAG | 17 | 2146 |
| CCR5-1794 | + | UGGAAGGUGUUCAGGAG | 17 | 2147 |
| CCR5-1795 | + | GGAGAAGGACAAUGUUG | 17 | 2148 |
| CCR5-1796 | + | GAGAAGGACAAUGUUGU | 17 | 2149 |
| CCR5-1797 | + | AGAAGGACAAUGUUGUA | 17 | 2150 |
| CCR5-1798 | + | CAAUGUUGUAGGGAGCC | 17 | 2151 |
| CCR5-1799 | + | UGUUGUAGGGAGCCCAG | 17 | 2152 |
| CCR5-1800 | + | UUGUAGGGAGCCCAGAA | 17 | 2153 |
| CCR5-1801 | + | AAUAAACAAUCAUGAUG | 17 | 2154 |
| CCR5-1802 | + | UUCUUCUCAUUUCGACA | 17 | 2155 |
| CCR5-1803 | + | UCAUUUCGACACCGAAG | 17 | 2156 |
| CCR5-1804 | + | CACCGAAGCAGAGUUUU | 17 | 2157 |
| CCR5-1805 | + | CAGAGUUUUUAGGAUUC | 17 | 2158 |
| CCR5-1806 | + | ACCAUGACAAGCAGCGG | 17 | 2159 |
| CCR5-1807 | + | AUGACUAUCUUUAAUGU | 17 | 2160 |
| CCR5-1808 | + | UGACUAUCUUUAAUGUC | 17 | 2161 |
| CCR5-1809 | + | AUGUCUGGAAAUUCUUC | 17 | 2162 |
| CCR5-1810 | + | GAAUUGAUACUGACUGU | 17 | 2163 |
| CCR5-1811 | + | AAUUGAUACUGACUGUA | 17 | 2164 |
| CCR5-1812 | + | UACUGACUGUAUGGAAA | 17 | 2165 |
| CCR5-1813 | + | CUGACUGUAUGGAAAAU | 17 | 2166 |
| CCR5-1814 | + | UGAGAGCUGCAGGUGUA | 17 | 2167 |
| CCR5-1815 | + | UAAUGAAGACCUUCUUU | 17 | 2168 |

[0650] Table 1F provides exemplary targeting domains for knocking out the CCR5 gene. In an embodiment, the targeting domain is the exact complement of the target domain. Any of the targeting domains in the table can be used with an N. meningitides Cas9 molecule that gives double stranded cleavage. Any of the targeting domains in the table can be used with an N. meningitides Cas9 single-stranded break nucleases (nickases). In an embodiment, dual targeting is used to create two nicks.

TABLE 1F

| | | | Target | |
|---|---|---|---|---|
| gRNA | DNA | | Site | SEQ ID |
| Name | Strand | Targeting Domain | Length | NO |
| CCR5-1816 | + | AUGGACGACAGCCAGGUACC | 20 | 2169 |
| CCR5-1817 | + | GAUUGUCAGGAGGAUGAUGA | 20 | 2170 |
| CCR5-1818 | + | GAGCGGAGGCAGGAGGCGGG | 20 | 2171 |
| CCR5-1819 | + | GCGGGCUGCGAUUUGCUUCA | 20 | 2172 |
| CCR5-1820 | + | CGAUGUAUAAUAAUUGAUGU | 20 | 2173 |
| CCR5-1821 | + | GACGACAGCCAGGUACC | 17 | 2174 |
| CCR5-1822 | + | UGUCAGGAGGAUGAUGA | 17 | 2175 |
| CCR5-1823 | + | CGGAGGCAGGAGGCGGG | 17 | 2176 |
| CCR5-1824 | + | GGCUGCGAUUUGCUUCA | 17 | 2177 |
| CCR5-1825 | + | UGUAUAAUAAUUGAUGU | 17 | 2178 |
| CCR5-1826 | − | UGUGAGGCUUAUCUUCACCA | 20 | 2179 |
| CCR5-1827 | − | AAGUUACUGUUAUAGAGGGU | 20 | 2180 |
| CCR5-1828 | − | UUUAUUUGGCAUCUGUUUAA | 20 | 2181 |
| CCR5-1829 | − | AAAAGAAAGCCUCAGAGAAU | 20 | 2182 |
| CCR5-1830 | − | UAUGGGGAGAAAAGACAUGA | 20 | 2183 |
| CCR5-1831 | − | AAAGAAAUGACACUUUUCAU | 20 | 2184 |
| CCR5-1832 | − | UGCAGAGUCAGCAGAACUGG | 20 | 2185 |
| CCR5-1833 | − | GAGAGAAUCCCUAGUCUUCA | 20 | 2186 |
| CCR5-1834 | − | GAGGUUUAGGUCAAGAAGAA | 20 | 2187 |
| CCR5-1835 | − | UCACUGAAUGCUUCUGACUU | 20 | 2188 |
| CCR5-1836 | − | UGAGGGGUCUCCAGGAGGAG | 20 | 2189 |
| CCR5-1837 | − | GCUCACACAUGAGAUCUAGG | 20 | 2190 |
| CCR5-1838 | − | ACACAUGAGAUCUAGGUGAG | 20 | 2191 |
| CCR5-1839 | − | AGUCAUUUCAUGGGUUGUUG | 20 | 2192 |
| CCR5-1840 | − | GUUUUUUUCUGUUCUGUCUC | 20 | 2193 |
| CCR5-1841 | − | GAGGCUUAUCUUCACCA | 17 | 2194 |
| CCR5-1842 | − | UUACUGUUAUAGAGGGU | 17 | 2195 |
| CCR5-1843 | − | AUUUGGCAUCUGUUUAA | 17 | 2196 |
| CCR5-1844 | − | AGAAAGCCUCAGAGAAU | 17 | 2197 |
| CCR5-1845 | − | GGGGAGAAAAGACAUGA | 17 | 2198 |
| CCR5-1846 | − | GAAAUGACACUUUUCAU | 17 | 2199 |
| CCR5-1847 | − | AGAGUCAGCAGAACUGG | 17 | 2200 |
| CCR5-1848 | − | AGAAUCCCUAGUCUUCA | 17 | 2201 |
| CCR5-1849 | − | GUUUAGGUCAAGAAGAA | 17 | 2202 |
| CCR5-1850 | − | CUGAAUGCUUCUGACUU | 17 | 2203 |
| CCR5-1851 | − | GGGGUCUCCAGGAGGAG | 17 | 2204 |
| CCR5-1852 | − | CACACAUGAGAUCUAGG | 17 | 2205 |
| CCR5-1853 | − | CAUGAGAUCUAGGUGAG | 17 | 2206 |
| CCR5-1854 | − | CAUUUCAUGGGUUGUUG | 17 | 2207 |
| CCR5-1855 | − | UUUUUCUGUUCUGUCUC | 17 | 2208 |
| CCR5-1856 | + | UUCAUUUCAAAGGGAGGGAG | 20 | 2209 |
| CCR5-1857 | + | UCUCCAAUCUGCUUGAAGAC | 20 | 2210 |
| CCR5-1858 | + | UGCUAUUUUUCAUCAACAUA | 20 | 2211 |
| CCR5-1859 | + | UCGACACCGAAGCAGAGUUU | 20 | 2212 |
| CCR5-1860 | + | AUUUCAAAGGGAGGGAG | 17 | 2213 |
| CCR5-1861 | + | CCAAUCUGCUUGAAGAC | 17 | 2214 |
| CCR5-1862 | + | UAUUUUUCAUCAACAUA | 17 | 2215 |
| CCR5-1863 | + | ACACCGAAGCAGAGUUU | 17 | 2216 |

[0651] Table 2A provides exemplary targeting domains for knocking out the CCR5 gene selected according to the first tier parameters. The targeting domains bind within the first 500 bp of the coding sequence (e.g., within 500 bp downstream from the start codon) and have a high level of orthogonality. It is contemplated herein that in an embodiment the targeting domain hybridizes to the target domain through complementary base pairing. Any of the targeting domains in the table can be used with a S. pyogenes Cas9 molecule that generates a double stranded break (Cas9 nuclease) or a single-stranded break (Cas9 nickase).

TABLE 2A
1st Tier

| | | | Target | |
|---|---|---|---|---|
| gRNA | DNA | | Site | SEQ ID |
| Name | Strand | Targeting Domain | Length | NO |
| CCR5-115 | − | ACUAUGCUGCCGCCCAG | 17 | 4343 |
| CCR5-121 | − | UCCUCCUGACAAUCGAU | 17 | 4344 |
| CCR5-116 | − | CUAUGCUGCCGCCCAGU | 17 | 4345 |
| CCR5-3 | − | GCCGCCCAGUGGGACUU | 17 | 4346 |
| CCR5-53 | − | UUGACAGGGCUCUAUUUUAU | 20 | 4347 |
| CCR5-75 | − | UCACUAUGCUGCCGCCCAGU | 20 | 4348 |

[0652] Table 2B provides exemplary targeting domains for knocking out the CCR5 gene selected according to the second tier parameters. The targeting domains bind within the first 500 bp of the coding sequence (e.g., within 500 bp downstream from the start codon). It is contemplated herein that in an embodiment the targeting domain hybridizes to the target domain through complementary base pairing. Any of the targeting domains in the table can be used with a S. pyogenes Cas9 molecule that generates a double stranded break (Cas9 nuclease) or a single-stranded break (Cas9 nickase).

TABLE 2B
2nd Tier

| | | | Target | |
|---|---|---|---|---|
| gRNA | DNA | | Site | SEQ ID |
| Name | Strand | Targeting Domain | Length | NO |
| CCR5-111 | − | UCCUGAUAAACUGCAAA | 17 | 4349 |
| CCR5-135 | + | ACUUGUCACCACCCCAA | 17 | 4350 |
| CCR5-4 | + | GCAUAGUGAGCCCAGAA | 17 | 4351 |
| CCR5-1864 | − | CUUUUUAUUUAUGCACA | 17 | 4352 |
| CCR5-118 | − | UGUGUCAACUCUUGACA | 17 | 4353 |
| CCR5-151 | + | UUAAAGCAAACACAGCA | 17 | 4354 |
| CCR5-132 | + | ACAUUGAUUUUUUGGCA | 17 | 4355 |
| CCR5-1865 | − | ACCAGAUCUCAAAAAGA | 17 | 4356 |
| CCR5-1866 | − | CACAGGGUGGAACAAGA | 17 | 4357 |
| CCR5-136 | + | AGAAGGGGACAGUAAGA | 17 | 4358 |
| CCR5-139 | + | AGCAUAGUGAGCCCAGA | 17 | 4359 |
| CCR5-5 | + | GAAAAACAGGUCAGAGA | 17 | 4360 |
| CCR5-123 | − | UGCUUUAAAAGCCAGGA | 17 | 4361 |
| CCR5-144 | + | CAGUAAGAAGGAAAAAC | 17 | 4362 |
| CCR5-148 | + | UAUUUCCAAAGUCCCAC | 17 | 4363 |
| CCR5-1867 | − | ACUUUUUAUUUAUGCAC | 17 | 4364 |
| CCR5-1 | − | GCCUCCGCUCUACUCAC | 17 | 4365 |
| CCR5-52 | − | AUGUGUCAACUCUUGAC | 17 | 4366 |
| CCR5-112 | − | CAUCUACCUGCUCAACC | 17 | 4367 |
| CCR5-10 | − | GACAAUCGAUAGGUACC | 17 | 4368 |
| CCR5-129 | − | GUGUUUGCGUCUCUCCC | 17 | 4369 |
| CCR5-122 | − | UGUUUGCUUUAAAAGCC | 17 | 4370 |
| CCR5-143 | + | CAGCAUGGACGACAGCC | 17 | 4371 |
| CCR5-131 | + | ACAGGUCAGAGAUGGCC | 17 | 4372 |
| CCR5-146 | + | CCCAAAGGUGACCGUCC | 17 | 4373 |
| CCR5-1868 | + | CUGGUAAAGAUGAUUCC | 17 | 4374 |
| CCR5-138 | + | AGAUGGCCAGGUUGAGC | 17 | 4375 |
| CCR5-8 | + | GAGCGGAGGCAGGAGGC | 17 | 4376 |
| CCR5-7 | + | GUGAGUAGAGCGGAGGC | 17 | 4377 |
| CCR5-64 | + | CACAUUGAUUUUUUGGC | 17 | 4378 |
| CCR5-110 | − | UUUUGUGGGCAACAUGC | 17 | 4379 |
| CCR5-1869 | + | ACCUUCUUUUUGAGAUC | 17 | 4380 |
| CCR5-6 | + | GCCUUUUGCAGUUUAUC | 17 | 4381 |
| CCR5-120 | − | UUUAUAGGCUUCUUCUC | 17 | 4382 |
| CCR5-14 | + | GGUACCUAUCGAUUGUC | 17 | 4383 |
| CCR5-113 | − | UUCUUACUGUCCCCUUC | 17 | 4384 |
| CCR5-145 | + | CAUAGUGAGCCCAGAAG | 17 | 4385 |
| CCR5-130 | + | AACACCAGUGAGUAGAG | 17 | 4386 |
| CCR5-65 | + | AGUAGAGCGGAGGCAGG | 17 | 4387 |
| CCR5-134 | + | ACCUAUCGAUUGUCAGG | 17 | 4388 |
| CCR5-137 | + | AGAGCGGAGGCAGGAGG | 17 | 4389 |
| CCR5-133 | + | ACCAGUGAGUAGAGCGG | 17 | 4390 |
| CCR5-1870 | − | UUUAUUUAUGCACAGGG | 17 | 4391 |
| CCR5-12 | − | GACGGUCACCUUUGGGG | 17 | 4392 |
| CCR5-149 | + | UCCAAAGUCCCACUGGG | 17 | 4393 |
| CCR5-127 | − | AAGUGUGAUCACUUGGG | 17 | 4394 |
| CCR5-128 | − | UGUGAUCACUUGGGUGG | 17 | 4395 |
| CCR5-150 | + | UGCAGUUUAUCAGGAUG | 17 | 4396 |
| CCR5-125 | − | CAGGACGGUCACCUUUG | 17 | 4397 |
| CCR5-2 | − | GUUCAUCUUUGGUUUUG | 17 | 4398 |
| CCR5-107 | − | CAUCAAUUAUUAUACAU | 17 | 4399 |
| CCR5-147 | + | UAAUUGAUGUCAUAGAU | 17 | 4400 |
| CCR5-119 | − | ACAGGGCUCUAUUUUAU | 17 | 4401 |
| CCR5-141 | + | AUUUCCAAAGUCCCACU | 17 | 4402 |
| CCR5-126 | − | UGACAAGUGUGAUCACU | 17 | 4403 |
| CCR5-1871 | + | UGGUAAAGAUGAUUCCU | 17 | 4404 |
| CCR5-114 | − | UCUUACUGUCCCCUUCU | 17 | 4405 |
| CCR5-109 | − | UUCAUCUUUGGUUUUGU | 17 | 4406 |
| CCR5-13 | − | GACAAGUGUGAUCACUU | 17 | 4407 |
| CCR5-11 | − | GCCAGGACGGUCACCUU | 17 | 4408 |
| CCR5-108 | − | UCACUGGUGUUCAUCUU | 17 | 4409 |
| CCR5-124 | − | CCAGGACGGUCACCUUU | 17 | 4410 |
| CCR5-9 | + | GCUUCACAUUGAUUUUU | 17 | 4411 |
| CCR5-70 | − | UCAUCCUGAUAAACUGCAAA | 20 | 4412 |
| CCR5-94 | + | CACACUUGUCACCACCCCAA | 20 | 4413 |
| CCR5-47 | + | GCAGCAUAGUGAGCCCAGAA | 20 | 4414 |
| CCR5-76 | − | CAAUGUGUCAACUCUUGACA | 20 | 4415 |
| CCR5-100 | + | CUUUUAAAGCAAACACAGCA | 20 | 4416 |
| CCR5-103 | + | UUCACAUUGAUUUUUUGGCA | 20 | 4417 |
| CCR5-1872 | − | UUUACCAGAUCUCAAAAAGA | 20 | 4418 |
| CCR5-1873 | − | AUGCACAGGGUGGAACAAGA | 20 | 4419 |
| CCR5-99 | + | CCCAGAAGGGGACAGUAAGA | 20 | 4420 |
| CCR5-46 | + | GGCAGCAUAGUGAGCCCAGA | 20 | 4421 |
| CCR5-89 | + | AAGGAAAAACAGGUCAGAGA | 20 | 4422 |
| CCR5-79 | − | GUUUGCUUUAAAAGCCAGGA | 20 | 4423 |
| CCR5-48 | + | GGACAGUAAGAAGGAAAAAC | 20 | 4424 |
| CCR5-104 | + | UUGUAUUUCCAAAGUCCCAC | 20 | 4425 |
| CCR5-66 | − | CCUGCCUCCGCUCUACUCAC | 20 | 4426 |
| CCR5-51 | − | ACAAUGUGUCAACUCUUGAC | 20 | 4427 |
| CCR5-71 | − | UGACAUCUACCUGCUCAACC | 20 | 4428 |
| CCR5-57 | − | CCUGACAAUCGAUAGGUACC | 20 | 4429 |
| CCR5-59 | − | GCUGUGUUUGCGUCUCUCCC | 20 | 4430 |
| CCR5-78 | − | CUGUGUUUGCUUUAAAAGCC | 20 | 4431 |
| CCR5-90 | + | ACACAGCAUGGACGACAGCC | 20 | 4432 |
| CCR5-87 | + | AAAACAGGUCAGAGAUGGCC | 20 | 4433 |
| CCR5-95 | + | CACCCCAAAGGUGACCGUCC | 20 | 4434 |
| CCR5-1874 | + | GAUCUGGUAAAGAUGAUUCC | 20 | 4435 |
| CCR5-96 | + | CAGAGAUGGCCAGGUUGAGC | 20 | 4436 |
| CCR5-50 | + | GUAGAGCGGAGGCAGGAGGC | 20 | 4437 |
| CCR5-98 | + | CCAGUGAGUAGAGCGGAGGC | 20 | 4438 |
| CCR5-63 | + | CUUCACAUUGAUUUUUUGGC | 20 | 4439 |
| CCR5-69 | − | UGGUUUUGUGGGCAACAUGC | 20 | 4440 |
| CCR5-1875 | + | AAGACCUUCUUUUUGAGAUC | 20 | 4441 |
| CCR5-62 | + | UCAGCCUUUUGCAGUUUAUC | 20 | 4442 |
| CCR5-77 | − | UAUUUUAUAGGCUUCUUCUC | 20 | 4443 |
| CCR5-60 | + | CCAGGUACCUAUCGAUUGUC | 20 | 4444 |
| CCR5-72 | − | UCCUUCUUACUGUCCCCUUC | 20 | 4445 |
| CCR5-97 | + | CAGCAUAGUGAGCCCAGAAG | 20 | 4446 |
| CCR5-74 | − | CUCACUAUGCUGCCGCCCAG | 20 | 4447 |
| CCR5-92 | + | AUGAACACCAGUGAGUAGAG | 20 | 4448 |
| CCR5-49 | + | GUGAGUAGAGCGGAGGCAGG | 20 | 4449 |
| CCR5-45 | + | GGUACCUAUCGAUUGUCAGG | 20 | 4450 |
| CCR5-91 | + | AGUAGAGCGGAGGCAGGAGG | 20 | 4451 |
| CCR5-88 | + | AACACCAGUGAGUAGAGCGG | 20 | 4452 |
| CCR5-1876 | − | CUUUUUAUUUAUGCACAGGG | 20 | 4453 |
| CCR5-83 | − | CAGGACGGUCACCUUUGGGG | 20 | 4454 |
| CCR5-93 | + | AUUUCCAAAGUCCCACUGGG | 20 | 4455 |
| CCR5-85 | − | GACAAGUGUGAUCACUUGGG | 20 | 4456 |
| CCR5-86 | − | AAGUGUGAUCACUUGGGUGG | 20 | 4457 |
| CCR5-106 | + | UUUUGCAGUUUAUCAGGAUG | 20 | 4458 |
| CCR5-82 | − | AGCCAGGACGGUCACCUUUG | 20 | 4459 |
| CCR5-41 | − | GGUGUUCAUCUUUGGUUUUG | 20 | 4460 |
| CCR5-67 | − | UGACAUCAAUUAUUAUACAU | 20 | 4461 |
| CCR5-101 | + | UAAUAAUUGAUGUCAUAGAU | 20 | 4462 |
| CCR5-55 | − | UCAUCCUCCUGACAAUCGAU | 20 | 4463 |
| CCR5-102 | + | UGUAUUUCCAAAGUCCCACU | 20 | 4464 |
| CCR5-84 | − | UGGUGACAAGUGUGAUCACU | 20 | 4465 |
| CCR5-1877 | + | AUCUGGUAAAGAUGAUUCCU | 20 | 4466 |
| CCR5-73 | − | CCUUCUUACUGUCCCCUUCU | 20 | 4467 |
| CCR5-42 | − | GUGUUCAUCUUUGGUUUUGU | 20 | 4468 |
| CCR5-58 | − | GGUGACAAGUGUGAUCACUU | 20 | 4469 |
| CCR5-43 | − | GCUGCCGCCCAGUGGGACUU | 20 | 4470 |
| CCR5-80 | − | AAAGCCAGGACGGUCACCUU | 20 | 4471 |
| CCR5-68 | − | UACUCACUGGUGUUCAUCUU | 20 | 4472 |
| CCR5-81 | − | AAGCCAGGACGGUCACCUUU | 20 | 4473 |
| CCR5-105 | + | UUUGCUUCACAUUGAUUUUU | 20 | 4474 |

[0653] Table 2C provides exemplary targeting domains for knocking out the CCR5 gene selected according to the third tier parameters. The targeting domains fall in the coding sequence of the gene, downstream of the first 500 bp of coding sequence (e.g., anywhere from +500 (relative to the start codon) to the stop codon of the gene). It is contemplated herein that in an embodiment the targeting domain hybridizes to the target domain through complementary base pairing. Any of the targeting domains in the table can be used with a S. pyogenes Cas9 molecule that generates a double stranded break (Cas9 nuclease) or a single-stranded break (Cas9 nickase).

TABLE 2C
3rd Tier

| | | | Target | |
|---|---|---|---|---|
| gRNA | DNA | | Site | SEQ ID |
| Name | Strand | Targeting Domain | Length | NO |
| CCR5-793 | + | GAACUUCUCCCCGACAA | 17 | 4475 |
| CCR5-382 | − | UGAGAAGAAGAGGCACA | 17 | 4476 |
| CCR5-403 | − | UCUGUGGGCUUGUGACA | 17 | 4477 |
| CCR5-376 | − | CCUGCCGCUGCUUGUCA | 17 | 4478 |
| CCR5-1865 | − | ACCAGAUCUCAAAAAGA | 17 | 4479 |
| CCR5-802 | + | GGAAGGUGUUCAGGAGA | 17 | 4480 |
| CCR5-800 | + | GCCAAAGAAUUCCUGGA | 17 | 4481 |
| CCR5-805 | + | AAAAUAAACAAUCAUGA | 17 | 4482 |
| CCR5-794 | + | GACAAAGGCAUAGAUGA | 17 | 4483 |
| CCR5-810 | + | AAUUGAUACUGACUGUA | 17 | 4484 |
| CCR5-804 | + | AGAAGGACAAUGUUGUA | 17 | 4485 |
| CCR5-388 | − | AUUGCAGUAGCUCUAAC | 17 | 4486 |
| CCR5-397 | − | GUUUACACCCGAUCCAC | 17 | 4487 |
| CCR5-381 | − | AUGAGAAGAAGAGGCAC | 17 | 4488 |
| CCR5-799 | + | UCAGGCCAAAGAAUUCC | 17 | 4489 |
| CCR5-1868 | + | CUGGUAAAGAUGAUUCC | 17 | 4490 |
| CCR5-386 | − | UCUCCUGAACACCUUCC | 17 | 4491 |
| CCR5-400 | − | CCGAUCCACUGGGGAGC | 17 | 4492 |
| CCR5-808 | + | CCAUGACAAGCAGCGGC | 17 | 4493 |
| CCR5-375 | − | GAUAGUCAUCUUGGGGC | 17 | 4494 |
| CCR5-406 | − | CACGGACUCAAGUGGGC | 17 | 4495 |
| CCR5-390 | − | GUUGGACCAAGCUAUGC | 17 | 4496 |
| CCR5-811 | + | UGGAAAAUGAGAGCUGC | 17 | 4497 |
| CCR5-789 | + | GCUCGGGAGCCUCUUGC | 17 | 4498 |
| CCR5-1869 | + | ACCUUCUUUUUGAGAUC | 17 | 4499 |
| CCR5-786 | + | CUGCUCCCCAGUGGAUC | 17 | 4500 |
| CCR5-378 | − | AUGGUCAUCUGCUACUC | 17 | 4501 |
| CCR5-788 | + | ACUGAGCUUGCUCGCUC | 17 | 4502 |
| CCR5-809 | + | UGACUAUCUUUAAUGUC | 17 | 4503 |
| CCR5-394 | − | UCAUCUAUGCCUUUGUC | 17 | 4504 |
| CCR5-371 | − | ACAGUCAGUAUCAAUUC | 17 | 4505 |
| CCR5-798 | + | AGCUACUGCAAUUAUUC | 17 | 4506 |
| CCR5-384 | − | UUGUUUAUUUUCUCUUC | 17 | 4507 |
| CCR5-801 | + | AUUCCUGGAAGGUGUUC | 17 | 4508 |
| CCR5-396 | − | UUCUAUUUUCCAGCAAG | 17 | 4509 |
| CCR5-404 | − | UGUGACACGGACUCAAG | 17 | 4510 |
| CCR5-380 | − | GUCGAAAUGAGAAGAAG | 17 | 4511 |
| CCR5-792 | + | UUUGGAAGAAGACUAAG | 17 | 4512 |
| CCR5-784 | + | UAUUUCCUGCUCCCCAG | 17 | 4513 |
| CCR5-807 | + | AUGACCAUGACAAGCAG | 17 | 4514 |
| CCR5-395 | − | CAUCUAUGCCUUUGUCG | 17 | 4515 |
| CCR5-796 | + | CAAAGGCAUAGAUGAUG | 17 | 4516 |
| CCR5-399 | − | UUACACCCGAUCCACUG | 17 | 4517 |
| CCR5-401 | − | GGAGCAGGAAAUAUCUG | 17 | 4518 |
| CCR5-383 | − | AGAGGCACAGGGCUGUG | 17 | 4519 |
| CCR5-374 | − | UAAAGAUAGUCAUCUUG | 17 | 4520 |
| CCR5-785 | + | CCUGCUCCCCAGUGGAU | 17 | 4521 |
| CCR5-795 | + | ACAAAGGCAUAGAUGAU | 17 | 4522 |
| CCR5-398 | − | UUUACACCCGAUCCACU | 17 | 4523 |
| CCR5-377 | − | CAUGGUCAUCUGCUACU | 17 | 4524 |
| CCR5-1871 | + | UGGUAAAGAUGAUUCCU | 17 | 4525 |
| CCR5-797 | + | CUGUCACCUGCAUAGCU | 17 | 4526 |
| CCR5-787 | + | AACUGAGCUUGCUCGCU | 17 | 4527 |
| CCR5-372 | − | AUUAAAGAUAGUCAUCU | 17 | 4528 |
| CCR5-391 | − | CAGGUGACAGAGACUCU | 17 | 4529 |
| CCR5-385 | − | UGUUUAUUUUCUCUUCU | 17 | 4530 |
| CCR5-405 | − | GUGACACGGACUCAAGU | 17 | 4531 |
| CCR5-389 | − | CAGUAGCUCUAACAGGU | 17 | 4532 |
| CCR5-402 | − | GAGCAGGAAAUAUCUGU | 17 | 4533 |
| CCR5-803 | + | GAGAAGGACAAUGUUGU | 17 | 4534 |
| CCR5-393 | − | AUCAUCUAUGCCUUUGU | 17 | 4535 |
| CCR5-379 | − | UCCUAAAAACUCUGCUU | 17 | 4536 |
| CCR5-373 | − | UUAAAGAUAGUCAUCUU | 17 | 4537 |
| CCR5-392 | − | AGGUGACAGAGACUCUU | 17 | 4538 |
| CCR5-387 | − | ACCUUCCAGGAAUUCUU | 17 | 4539 |
| CCR5-790 | + | GCAUUUGCAGAAGCGUU | 17 | 4540 |
| CCR5-791 | + | GUUUGGCAAUGUGCUUU | 17 | 4541 |
| CCR5-806 | + | ACCGAAGCAGAGUUUUU | 17 | 4542 |
| CCR5-682 | + | UCUGAACUUCUCCCCGACAA | 20 | 4543 |
| CCR5-163 | − | AAAUGAGAAGAAGAGGCACA | 20 | 4544 |
| CCR5-184 | − | AUAUCUGUGGGCUUGUGACA | 20 | 4545 |
| CCR5-157 | − | GGUCCUGCCGCUGCUUGUCA | 20 | 4546 |
| CCR5-1872 | − | UUUACCAGAUCUCAAAAAGA | 20 | 4547 |
| CCR5-691 | + | CCUGGAAGGUGUUCAGGAGA | 20 | 4548 |
| CCR5-689 | + | CAGGCCAAAGAAUUCCUGGA | 20 | 4549 |
| CCR5-694 | + | GAGAAAAUAAACAAUCAUGA | 20 | 4550 |
| CCR5-683 | + | CCCGACAAAGGCAUAGAUGA | 20 | 4551 |
| CCR5-699 | + | CAGAAUUGAUACUGACUGUA | 20 | 4552 |
| CCR5-693 | + | AGGAGAAGGACAAUGUUGUA | 20 | 4553 |
| CCR5-169 | − | AUAAUUGCAGUAGCUCUAAC | 20 | 4554 |
| CCR5-178 | − | UCAGUUUACACCCGAUCCAC | 20 | 4555 |
| CCR5-162 | − | GAAAUGAGAAGAAGAGGCAC | 20 | 4556 |
| CCR5-688 | + | UAUUCAGGCCAAAGAAUUCC | 20 | 4557 |
| CCR5-1874 | + | GAUCUGGUAAAGAUGAUUCC | 20 | 4558 |
| CCR5-167 | − | CCUUCUCCUGAACACCUUCC | 20 | 4559 |
| CCR5-181 | − | CACCCGAUCCACUGGGGAGC | 20 | 4560 |
| CCR5-697 | + | UGACCAUGACAAGCAGCGGC | 20 | 4561 |
| CCR5-156 | − | AAAGAUAGUCAUCUUGGGGC | 20 | 4562 |
| CCR5-187 | − | UGACACGGACUCAAGUGGGC | 20 | 4563 |
| CCR5-171 | − | CAGGUUGGACCAAGCUAUGC | 20 | 4564 |
| CCR5-700 | + | GUAUGGAAAAUGAGAGCUGC | 20 | 4565 |
| CCR5-678 | + | CUCGCUCGGGAGCCUCUUGC | 20 | 4566 |
| CCR5-1875 | + | AAGACCUUCUUUUUGAGAUC | 20 | 4567 |
| CCR5-675 | + | UUCCUGCUCCCCAGUGGAUC | 20 | 4568 |
| CCR5-159 | − | GUCAUGGUCAUCUGCUACUC | 20 | 4569 |
| CCR5-677 | + | UAAACUGAGCUUGCUCGCUC | 20 | 4570 |
| CCR5-698 | + | AGAUGACUAUCUUUAAUGUC | 20 | 4571 |
| CCR5-175 | − | CCAUCAUCUAUGCCUUUGUC | 20 | 4572 |
| CCR5-152 | − | CAUACAGUCAGUAUCAAUUC | 20 | 4573 |
| CCR5-687 | + | UAGAGCUACUGCAAUUAUUC | 20 | 4574 |
| CCR5-165 | − | UGAUUGUUUAUUUUCUCUUC | 20 | 4575 |
| CCR5-690 | + | AGAAUUCCUGGAAGGUGUUC | 20 | 4576 |
| CCR5-177 | − | CUGUUCUAUUUUCCAGCAAG | 20 | 4577 |
| CCR5-185 | − | GCUUGUGACACGGACUCAAG | 20 | 4578 |
| CCR5-161 | − | GGUGUCGAAAUGAGAAGAAG | 20 | 4579 |
| CCR5-681 | + | GCUUUUGGAAGAAGACUAAG | 20 | 4580 |
| CCR5-673 | + | AGAUAUUUCCUGCUCCCCAG | 20 | 4581 |
| CCR5-696 | + | CAGAUGACCAUGACAAGCAG | 20 | 4582 |
| CCR5-176 | − | CAUCAUCUAUGCCUUUGUCG | 20 | 4583 |
| CCR5-685 | + | CGACAAAGGCAUAGAUGAUG | 20 | 4584 |
| CCR5-180 | − | AGUUUACACCCGAUCCACUG | 20 | 4585 |
| CCR5-182 | − | UGGGGAGCAGGAAAUAUCUG | 20 | 4586 |
| CCR5-164 | − | AGAAGAGGCACAGGGCUGUG | 20 | 4587 |
| CCR5-155 | − | CAUUAAAGAUAGUCAUCUUG | 20 | 4588 |
| CCR5-674 | + | UUUCCUGCUCCCCAGUGGAU | 20 | 4589 |
| CCR5-684 | + | CCGACAAAGGCAUAGAUGAU | 20 | 4590 |
| CCR5-179 | − | CAGUUUACACCCGAUCCACU | 20 | 4591 |
| CCR5-158 | − | UGUCAUGGUCAUCUGCUACU | 20 | 4592 |
| CCR5-1877 | + | AUCUGGUAAAGAUGAUUCCU | 20 | 4593 |
| CCR5-686 | + | UCUCUGUCACCUGCAUAGCU | 20 | 4594 |
| CCR5-676 | + | GUAAACUGAGCUUGCUCGCU | 20 | 4595 |
| CCR5-153 | − | GACAUUAAAGAUAGUCAUCU | 20 | 4596 |
| CCR5-172 | − | AUGCAGGUGACAGAGACUCU | 20 | 4597 |
| CCR5-166 | − | GAUUGUUUAUUUUCUCUUCU | 20 | 4598 |
| CCR5-186 | − | CUUGUGACACGGACUCAAGU | 20 | 4599 |
| CCR5-170 | − | UUGCAGUAGCUCUAACAGGU | 20 | 4600 |
| CCR5-183 | − | GGGGAGCAGGAAAUAUCUGU | 20 | 4601 |
| CCR5-692 | + | CAGGAGAAGGACAAUGUUGU | 20 | 4602 |
| CCR5-174 | − | CCCAUCAUCUAUGCCUUUGU | 20 | 4603 |
| CCR5-160 | − | GAAUCCUAAAAACUCUGCUU | 20 | 4604 |
| CCR5-154 | − | ACAUUAAAGAUAGUCAUCUU | 20 | 4605 |
| CCR5-173 | − | UGCAGGUGACAGAGACUCUU | 20 | 4606 |
| CCR5-168 | − | AACACCUUCCAGGAAUUCUU | 20 | 4607 |
| CCR5-679 | + | ACAGCAUUUGCAGAAGCGUU | 20 | 4608 |
| CCR5-680 | + | AGCGUUUGGCAAUGUGCUUU | 20 | 4609 |
| CCR5-695 | + | GACACCGAAGCAGAGUUUUU | 20 | 4610 |

[0654] Table 3A provides exemplary targeting domains for knocking out the CCR5 gene selected according to the first tier parameters. The targeting domains bind within the first 500 bp of the coding sequence (e.g., within 500 bp downstream from the start codon), have a high level of orthogonality and PAM is NNGRRT. It is contemplated herein that in an embodiment the targeting domain hybridizes to the target domain through complementary base pairing. Any of the targeting domains in the table can be used with a S. aureus Cas9 molecule that generates a double stranded break (Cas9 nuclease) or a single-stranded break (Cas9 nickase).

TABLE 3A
1st Tier

| gRNA | DNA | | Target Site | SEQ ID |
|---|---|---|---|---|
| Name | Strand | Targeting Domain | Length | NO |
| CCR5-1878 | + | AUAAAAUAGAGCCCUGUC | 18 | 4611 |
| CCR5-1879 | + | UAUAAAAUAGAGCCCUGUC | 19 | 4612 |
| CCR5-862 | + | CUAUAAAAUAGAGCCCUGUC | 20 | 4613 |
| CCR5-1880 | + | CCUAUAAAAUAGAGCCCUGUC | 21 | 4614 |
| CCR5-1881 | + | GCCUAUAAAAUAGAGCCCUGUC | 22 | 4615 |
| CCR5-1882 | + | AGCCUAUAAAAUAGAGCCCUGUC | 23 | 4616 |
| CCR5-1883 | + | AAGCCUAUAAAAUAGAGCCCUGUC | 24 | 4617 |
| CCR5-1884 | + | UUUGCAGUUUAUCAGGAU | 18 | 4618 |
| CCR5-1885 | + | UUUUGCAGUUUAUCAGGAU | 19 | 4619 |
| CCR5-876 | + | CUUUUGCAGUUUAUCAGGAU | 20 | 4620 |
| CCR5-1886 | − | GGUGACAAGUGUGAUCAC | 18 | 4621 |
| CCR5-1887 | − | UGGUGACAAGUGUGAUCAC | 19 | 4622 |
| CCR5-829 | − | GUGGUGACAAGUGUGAUCAC | 20 | 4623 |
| CCR5-1888 | − | GGUGGUGACAAGUGUGAUCAC | 21 | 4624 |
| CCR5-1889 | − | GGGUGGUGACAAGUGUGAUCAC | 22 | 4625 |
| CCR5-1890 | − | GGGGUGGUGACAAGUGUGAUCAC | 23 | 4626 |
| CCR5-1891 | − | UGGGGUGGUGACAAGUGUGAUCAC | 24 | 4627 |
| CCR5-1892 | − | UUAUGCACAGGGUGGAACAAG | 21 | 4628 |
| CCR5-1893 | − | UUUAUGCACAGGGUGGAACAAG | 22 | 4629 |
| CCR5-1894 | − | AUUUAUGCACAGGGUGGAACAAG | 23 | 4630 |
| CCR5-1895 | − | UAUUUAUGCACAGGGUGGAACAAG | 24 | 4631 |

[0655] Table 3B provides exemplary targeting domains for knocking out the CCR5 gene selected according to the second tier parameters. The targeting domains bind within the first 500 bp of the coding sequence (e.g., with 500 bp downstream from the start codon) and PAM is NNGRRT. It is contemplated herein that in an embodiment the targeting domain hybridizes to the target domain through complementary base pairing. Any of the targeting domains in the table can be used with a S. aureus Cas9 molecule that generates a double stranded break (Cas9 nuclease) or a single-stranded break (Cas9 nickase).

TABLE 3B
2nd Tier

| gRNA | DNA | | Target Site | SEQ ID |
|---|---|---|---|---|
| Name | Strand | Targeting Domain | Length | NO |
| CCR5-1896 | + | AACCAAAGAUGAACACCA | 18 | 4632 |
| CCR5-1897 | + | AAACCAAAGAUGAACACCA | 19 | 4633 |
| CCR5-878 | + | AAAACCAAAGAUGAACACCA | 20 | 4634 |
| CCR5-1898 | + | CAAAACCAAAGAUGAACACCA | 21 | 4635 |
| CCR5-1899 | + | ACAAAACCAAAGAUGAACACCA | 22 | 4636 |
| CCR5-1900 | + | CACAAAACCAAAGAUGAACACCA | 23 | 4637 |
| CCR5-1901 | + | CCACAAAACCAAAGAUGAACACCA | 24 | 4638 |
| CCR5-1902 | + | GUACCUAUCGAUUGUCAG | 18 | 4639 |
| CCR5-1903 | + | GGUACCUAUCGAUUGUCAG | 19 | 4640 |
| CCR5-855 | + | AGGUACCUAUCGAUUGUCAG | 20 | 4641 |
| CCR5-1904 | + | CAGGUACCUAUCGAUUGUCAG | 21 | 4642 |
| CCR5-1905 | + | CCAGGUACCUAUCGAUUGUCAG | 22 | 4643 |
| CCR5-1906 | + | GCCAGGUACCUAUCGAUUGUCAG | 23 | 4644 |
| CCR5-1907 | + | AGCCAGGUACCUAUCGAUUGUCAG | 24 | 4645 |
| CCR5-1908 | + | CCUUUUGCAGUUUAUCAGGAU | 21 | 4646 |
| CCR5-1909 | + | GCCUUUUGCAGUUUAUCAGGAU | 22 | 4647 |
| CCR5-1910 | + | AGCCUUUUGCAGUUUAUCAGGAU | 23 | 4648 |
| CCR5-1911 | + | CAGCCUUUUGCAGUUUAUCAGGAU | 24 | 4649 |
| CCR5-1912 | + | CAGCCUUUUGCAGUUUAU | 18 | 4650 |
| CCR5-1913 | + | UCAGCCUUUUGCAGUUUAU | 19 | 4651 |
| CCR5-874 | + | UUCAGCCUUUUGCAGUUUAU | 20 | 4652 |
| CCR5-1914 | + | CUUCAGCCUUUUGCAGUUUAU | 21 | 4653 |
| CCR5-1915 | + | UCUUCAGCCUUUUGCAGUUUAU | 22 | 4654 |
| CCR5-1916 | + | CUCUUCAGCCUUUUGCAGUUUAU | 23 | 4655 |
| CCR5-1917 | + | GCUCUUCAGCCUUUUGCAGUUUAU | 24 | 4656 |
| CCR5-1918 | − | UGUGUUUGCGUCUCUCCC | 18 | 4657 |
| CCR5-1919 | − | CUGUGUUUGCGUCUCUCCC | 19 | 4658 |
| CCR5-59 | − | GCUGUGUUUGCGUCUCUCCC | 20 | 4659 |
| CCR5-1920 | − | GGCUGUGUUUGCGUCUCUCCC | 21 | 4660 |
| CCR5-1921 | − | UGGCUGUGUUUGCGUCUCUCCC | 22 | 4661 |
| CCR5-1922 | − | GUGGCUGUGUUUGCGUCUCUCCC | 23 | 4662 |
| CCR5-1923 | − | GGUGGCUGUGUUUGCGUCUCUCCC | 24 | 4663 |
| CCR5-1924 | − | UUUUAUAGGCUUCUUCUC | 18 | 4664 |
| CCR5-1925 | − | AUUUUAUAGGCUUCUUCUC | 19 | 4665 |
| CCR5-77 | − | UAUUUUAUAGGCUUCUUCUC | 20 | 4666 |
| CCR5-1926 | − | CUAUUUUAUAGGCUUCUUCUC | 21 | 4667 |
| CCR5-1927 | − | UCUAUUUUAUAGGCUUCUUCUC | 22 | 4668 |
| CCR5-1928 | − | CUCUAUUUUAUAGGCUUCUUCUC | 23 | 4669 |
| CCR5-1929 | − | GCUCUAUUUUAUAGGCUUCUUCUC | 24 | 4670 |
| CCR5-1930 | − | UGCACAGGGUGGAACAAG | 18 | 4671 |
| CCR5-1931 | − | AUGCACAGGGUGGAACAAG | 19 | 4672 |
| CCR5-1932 | − | UAUGCACAGGGUGGAACAAG | 20 | 4673 |
| CCR5-1933 | − | AGCCAGGACGGUCACCUU | 18 | 4674 |
| CCR5-1934 | − | AAGCCAGGACGGUCACCUU | 19 | 4675 |
| CCR5-80 | − | AAAGCCAGGACGGUCACCUU | 20 | 4676 |
| CCR5-1935 | − | AAAAGCCAGGACGGUCACCUU | 21 | 4677 |
| CCR5-1936 | − | UAAAAGCCAGGACGGUCACCUU | 22 | 4678 |
| CCR5-1937 | − | UUAAAAGCCAGGACGGUCACCUU | 23 | 4679 |
| CCR5-1938 | − | UUUAAAAGCCAGGACGGUCACCUU | 24 | 4680 |

[0656] Table 3C provides exemplary targeting domains for knocking out the CCR5 gene selected according to the third tier parameters. The targeting domains bind within the first 500 bp of the coding sequence (e.g., with 500 bp downstream from the start codon) and PAM is NNGRRV. It is contemplated herein that in an embodiment the targeting domain hybridizes to the target domain through complementary base pairing. Any of the targeting domains in the table can be used with a S. aureus Cas9 molecule that generates a double stranded break (Cas9 nuclease) or a single-stranded break (Cas9 nickase).

TABLE 3C
3rd Tier

| gRNA | DNA | | Target Site | SEQ ID |
|---|---|---|---|---|
| Name | Strand | Targeting Domain | Length | NO |
| CCR5-2255 | + | GAUAUUUCCUGCUCCCCA | 18 | 4681 |
| CCR5-2256 | + | AGAUAUUUCCUGCUCCCCA | 19 | 4682 |
| CCR5-1611 | + | CAGAUAUUUCCUGCUCCCCA | 20 | 4683 |
| CCR5-2257 | + | ACAGAUAUUUCCUGCUCCCCA | 21 | 4684 |
| CCR5-2258 | + | CACAGAUAUUUCCUGCUCCCCA | 22 | 4685 |
| CCR5-2259 | + | CCACAGAUAUUUCCUGCUCCCCA | 23 | 4686 |
| CCR5-2260 | + | CCCACAGAUAUUUCCUGCUCCCCA | 24 | 4687 |
| CCR5-2261 | + | CUGCAAUUAUUCAGGCCA | 18 | 4688 |
| CCR5-2262 | + | ACUGCAAUUAUUCAGGCCA | 19 | 4689 |
| CCR5-1630 | + | UACUGCAAUUAUUCAGGCCA | 20 | 4690 |
| CCR5-2263 | + | CUACUGCAAUUAUUCAGGCCA | 21 | 4691 |
| CCR5-2264 | + | GCUACUGCAAUUAUUCAGGCCA | 22 | 4692 |
| CCR5-2265 | + | AGCUACUGCAAUUAUUCAGGCCA | 23 | 4693 |
| CCR5-2266 | + | GAGCUACUGCAAUUAUUCAGGCCA | 24 | 4694 |
| CCR5-2267 | + | UUCCUGCUCCCCAGUGGA | 18 | 4695 |
| CCR5-2268 | + | UUUCCUGCUCCCCAGUGGA | 19 | 4696 |
| CCR5-1612 | + | AUUUCCUGCUCCCCAGUGGA | 20 | 4697 |
| CCR5-2269 | + | UAUUUCCUGCUCCCCAGUGGA | 21 | 4698 |
| CCR5-2270 | + | AUAUUUCCUGCUCCCCAGUGGA | 22 | 4699 |
| CCR5-2271 | + | GAUAUUUCCUGCUCCCCAGUGGA | 23 | 4700 |
| CCR5-2272 | + | AGAUAUUUCCUGCUCCCCAGUGGA | 24 | 4701 |
| CCR5-2273 | + | CGACAAAGGCAUAGAUGA | 18 | 4702 |
| CCR5-2274 | + | CCGACAAAGGCAUAGAUGA | 19 | 4703 |
| CCR5-683 | + | CCCGACAAAGGCAUAGAUGA | 20 | 4704 |
| CCR5-2275 | + | CCCCGACAAAGGCAUAGAUGA | 21 | 4705 |
| CCR5-2276 | + | UCCCCGACAAAGGCAUAGAUGA | 22 | 4706 |
| CCR5-2277 | + | CUCCCCGACAAAGGCAUAGAUGA | 23 | 4707 |
| CCR5-2278 | + | UCUCCCCGACAAAGGCAUAGAUGA | 24 | 4708 |
| CCR5-2279 | + | GCAGCAGUGCGUCAUCCC | 18 | 4709 |
| CCR5-2280 | + | UGCAGCAGUGCGUCAUCCC | 19 | 4710 |
| CCR5-1628 | + | AUGCAGCAGUGCGUCAUCCC | 20 | 4711 |
| CCR5-2281 | + | GAUGCAGCAGUGCGUCAUCCC | 21 | 4712 |
| CCR5-2282 | + | UGAUGCAGCAGUGCGUCAUCCC | 22 | 4713 |
| CCR5-2283 | + | UUGAUGCAGCAGUGCGUCAUCCC | 23 | 4714 |
| CCR5-2284 | + | GUUGAUGCAGCAGUGCGUCAUCCC | 24 | 4715 |
| CCR5-2285 | + | GCAGAGUUUUUAGGAUUC | 18 | 4716 |
| CCR5-2286 | + | AGCAGAGUUUUUAGGAUUC | 19 | 4717 |
| CCR5-1647 | + | AAGCAGAGUUUUUAGGAUUC | 20 | 4718 |
| CCR5-2287 | + | GAAGCAGAGUUUUUAGGAUUC | 21 | 4719 |
| CCR5-2288 | + | CGAAGCAGAGUUUUUAGGAUUC | 22 | 4720 |
| CCR5-2289 | + | CCGAAGCAGAGUUUUUAGGAUUC | 23 | 4721 |
| CCR5-2290 | + | ACCGAAGCAGAGUUUUUAGGAUUC | 24 | 4722 |
| CCR5-2291 | + | AAUGUCUGGAAAUUCUUC | 18 | 4723 |
| CCR5-2292 | + | UAAUGUCUGGAAAUUCUUC | 19 | 4724 |
| CCR5-1651 | + | UUAAUGUCUGGAAAUUCUUC | 20 | 4725 |
| CCR5-2293 | + | UUUAAUGUCUGGAAAUUCUUC | 21 | 4726 |
| CCR5-2294 | + | CUUUAAUGUCUGGAAAUUCUUC | 22 | 4727 |
| CCR5-2295 | + | UCUUUAAUGUCUGGAAAUUCUUC | 23 | 4728 |
| CCR5-2296 | + | AUCUUUAAUGUCUGGAAAUUCUUC | 24 | 4729 |
| CCR5-2297 | + | CUCAUUUCGACACCGAAG | 18 | 4730 |
| CCR5-2298 | + | UCUCAUUUCGACACCGAAG | 19 | 4731 |
| CCR5-1645 | + | UUCUCAUUUCGACACCGAAG | 20 | 4732 |
| CCR5-2299 | + | CUUCUCAUUUCGACACCGAAG | 21 | 4733 |
| CCR5-2300 | + | UCUUCUCAUUUCGACACCGAAG | 22 | 4734 |
| CCR5-2301 | + | UUCUUCUCAUUUCGACACCGAAG | 23 | 4735 |
| CCR5-2302 | + | CUUCUUCUCAUUUCGACACCGAAG | 24 | 4736 |
| CCR5-2303 | + | ACACCGAAGCAGAGUUUU | 18 | 4737 |
| CCR5-2304 | + | GACACCGAAGCAGAGUUUU | 19 | 4738 |
| CCR5-1646 | + | CGACACCGAAGCAGAGUUUU | 20 | 4739 |
| CCR5-2305 | + | UCGACACCGAAGCAGAGUUUU | 21 | 4740 |
| CCR5-2306 | + | UUCGACACCGAAGCAGAGUUUU | 22 | 4741 |
| CCR5-2307 | + | UUUCGACACCGAAGCAGAGUUUU | 23 | 4742 |
| CCR5-2308 | + | AUUUCGACACCGAAGCAGAGUUUU | 24 | 4743 |
| CCR5-2309 | − | UUCUCCUGAACACCUUCC | 18 | 4744 |
| CCR5-2310 | − | CUUCUCCUGAACACCUUCC | 19 | 4745 |
| CCR5-167 | − | CCUUCUCCUGAACACCUUCC | 20 | 4746 |
| CCR5-2311 | − | UCCUUCUCCUGAACACCUUCC | 21 | 4747 |
| CCR5-2312 | − | GUCCUUCUCCUGAACACCUUCC | 22 | 4748 |
| CCR5-2313 | − | UGUCCUUCUCCUGAACACCUUCC | 23 | 4749 |
| CCR5-2314 | − | UUGUCCUUCUCCUGAACACCUUCC | 24 | 4750 |
| CCR5-2315 | − | UUCCAGGAAUUCUUUGGC | 18 | 4751 |
| CCR5-2316 | − | CUUCCAGGAAUUCUUUGGC | 19 | 4752 |
| CCR5-941 | − | CCUUCCAGGAAUUCUUUGGC | 20 | 4753 |
| CCR5-2317 | − | ACCUUCCAGGAAUUCUUUGGC | 21 | 4754 |
| CCR5-2318 | − | CACCUUCCAGGAAUUCUUUGGC | 22 | 4755 |
| CCR5-2319 | − | ACACCUUCCAGGAAUUCUUUGGC | 23 | 4756 |
| CCR5-2320 | − | AACACCUUCCAGGAAUUCUUUGGC | 24 | 4757 |
| CCR5-2321 | − | CAUGGUCAUCUGCUACUC | 18 | 4758 |
| CCR5-2322 | − | UCAUGGUCAUCUGCUACUC | 19 | 4759 |
| CCR5-159 | − | GUCAUGGUCAUCUGCUACUC | 20 | 4760 |
| CCR5-2323 | − | UGUCAUGGUCAUCUGCUACUC | 21 | 4761 |
| CCR5-2324 | − | UUGUCAUGGUCAUCUGCUACUC | 22 | 4762 |
| CCR5-2325 | − | CUUGUCAUGGUCAUCUGCUACUC | 23 | 4763 |
| CCR5-2326 | − | GCUUGUCAUGGUCAUCUGCUACUC | 24 | 4764 |
| CCR5-2327 | − | AGUCAGUAUCAAUUCUGG | 18 | 4765 |
| CCR5-2328 | − | CAGUCAGUAUCAAUUCUGG | 19 | 4766 |
| CCR5-924 | − | ACAGUCAGUAUCAAUUCUGG | 20 | 4767 |
| CCR5-2329 | − | UACAGUCAGUAUCAAUUCUGG | 21 | 4768 |
| CCR5-2330 | − | AUACAGUCAGUAUCAAUUCUGG | 22 | 4769 |
| CCR5-2331 | − | CAUACAGUCAGUAUCAAUUCUGG | 23 | 4770 |
| CCR5-2332 | − | CCAUACAGUCAGUAUCAAUUCUGG | 24 | 4771 |
| CCR5-2333 | − | GCAGGUGACAGAGACUCU | 18 | 4772 |
| CCR5-2334 | − | UGCAGGUGACAGAGACUCU | 19 | 4773 |
| CCR5-172 | − | AUGCAGGUGACAGAGACUCU | 20 | 4774 |
| CCR5-2335 | − | UAUGCAGGUGACAGAGACUCU | 21 | 4775 |
| CCR5-2336 | − | CUAUGCAGGUGACAGAGACUCU | 22 | 4776 |
| CCR5-2337 | − | GCUAUGCAGGUGACAGAGACUCU | 23 | 4777 |
| CCR5-2338 | − | AGCUAUGCAGGUGACAGAGACUCU | 24 | 4778 |

[0657] Table 3D provides exemplary targeting domains for knocking out the CCR5 gene selected according to the fourth tier parameters. The targeting domains fall in the coding sequence of the gene, downstream of the first 500 bp of coding sequence (e.g., anywhere from +500 (relative to the start codon) to the stop codon of the gene.) and PAM is NNGRRT. It is contemplated herein that in an embodiment the targeting domain hybridizes to the target domain through complementary base pairing. Any of the targeting domains in the table can be used with a S. aureus Cas9 molecule that generates a double stranded break (Cas9 nuclease) or a single-stranded break (Cas9 nickase).

TABLE 3D
3rd Tier

| gRNA | DNA | | Target Site | SEQ ID |
|---|---|---|---|---|
| Name | Strand | Targeting Domain | Length | NO |
| CCR5-1939 | + | GAGAAGAAGCCUAUAAAA | 18 | 4779 |
| CCR5-1940 | + | AGAGAAGAAGCCUAUAAAA | 19 | 4780 |
| CCR5-861 | + | CAGAGAAGAAGCCUAUAAAA | 20 | 4781 |
| CCR5-1941 | + | CCAGAGAAGAAGCCUAUAAAA | 21 | 4782 |
| CCR5-1942 | + | UCCAGAGAAGAAGCCUAUAAAA | 22 | 4783 |
| CCR5-1943 | + | UUCCAGAGAAGAAGCCUAUAAAA | 23 | 4784 |
| CCR5-1944 | + | AUUCCAGAGAAGAAGCCUAUAAAA | 24 | 4785 |
| CCR5-1945 | + | AGCAUAGUGAGCCCAGAA | 18 | 4786 |
| CCR5-1946 | + | CAGCAUAGUGAGCCCAGAA | 19 | 4787 |
| CCR5-47 | + | GCAGCAUAGUGAGCCCAGAA | 20 | 4788 |
| CCR5-1947 | + | GGCAGCAUAGUGAGCCCAGAA | 21 | 4789 |
| CCR5-1948 | + | CGGCAGCAUAGUGAGCCCAGAA | 22 | 4790 |
| CCR5-1949 | + | GCGGCAGCAUAGUGAGCCCAGAA | 23 | 4791 |
| CCR5-1950 | + | GGCGGCAGCAUAGUGAGCCCAGAA | 24 | 4792 |
| CCR5-1951 | + | UGUAUUUCCAAAGUCCCA | 18 | 4793 |
| CCR5-1952 | + | UUGUAUUUCCAAAGUCCCA | 19 | 4794 |
| CCR5-863 | + | AUUGUAUUUCCAAAGUCCCA | 20 | 4795 |
| CCR5-1953 | + | CAUUGUAUUUCCAAAGUCCCA | 21 | 4796 |
| CCR5-1954 | + | ACAUUGUAUUUCCAAAGUCCCA | 22 | 4797 |
| CCR5-1955 | + | CACAUUGUAUUUCCAAAGUCCCA | 23 | 4798 |
| CCR5-1956 | + | ACACAUUGUAUUUCCAAAGUCCCA | 24 | 4799 |
| CCR5-1957 | + | AUGAUGAAGAAGAUUCCA | 18 | 4800 |
| CCR5-1958 | + | GAUGAUGAAGAAGAUUCCA | 19 | 4801 |
| CCR5-859 | + | GGAUGAUGAAGAAGAUUCCA | 20 | 4802 |
| CCR5-1959 | + | AGGAUGAUGAAGAAGAUUCCA | 21 | 4803 |
| CCR5-1960 | + | GAGGAUGAUGAAGAAGAUUCCA | 22 | 4804 |
| CCR5-1961 | + | GGAGGAUGAUGAAGAAGAUUCCA | 23 | 4805 |
| CCR5-1962 | + | AGGAGGAUGAUGAAGAAGAUUCCA | 24 | 4806 |
| CCR5-1963 | + | CAGAAGGGGACAGUAAGA | 18 | 4807 |
| CCR5-1964 | + | CCAGAAGGGGACAGUAAGA | 19 | 4808 |
| CCR5-99 | + | CCCAGAAGGGGACAGUAAGA | 20 | 4809 |
| CCR5-1965 | + | GCCCAGAAGGGGACAGUAAGA | 21 | 4810 |
| CCR5-1966 | + | AGCCCAGAAGGGGACAGUAAGA | 22 | 4811 |
| CCR5-1967 | + | GAGCCCAGAAGGGGACAGUAAGA | 23 | 4812 |
| CCR5-1968 | + | UGAGCCCAGAAGGGGACAGUAAGA | 24 | 4813 |
| CCR5-1969 | + | CAGCAUAGUGAGCCCAGA | 18 | 4814 |
| CCR5-1970 | + | GCAGCAUAGUGAGCCCAGA | 19 | 4815 |
| CCR5-46 | + | GGCAGCAUAGUGAGCCCAGA | 20 | 4816 |
| CCR5-1971 | + | CGGCAGCAUAGUGAGCCCAGA | 21 | 4817 |
| CCR5-1972 | + | GCGGCAGCAUAGUGAGCCCAGA | 22 | 4818 |
| CCR5-1973 | + | GGCGGCAGCAUAGUGAGCCCAGA | 23 | 4819 |
| CCR5-1974 | + | GGGCGGCAGCAUAGUGAGCCCAGA | 24 | 4820 |
| CCR5-1975 | + | AAUAAUUGAUGUCAUAGA | 18 | 4821 |
| CCR5-1976 | + | UAAUAAUUGAUGUCAUAGA | 19 | 4822 |
| CCR5-886 | + | AUAAUAAUUGAUGUCAUAGA | 20 | 4823 |
| CCR5-1977 | + | UAUAAUAAUUGAUGUCAUAGA | 21 | 4824 |
| CCR5-1978 | + | GUAUAAUAAUUGAUGUCAUAGA | 22 | 4825 |
| CCR5-1979 | + | UGUAUAAUAAUUGAUGUCAUAGA | 23 | 4826 |
| CCR5-1980 | + | AUGUAUAAUAAUUGAUGUCAUAGA | 24 | 4827 |
| CCR5-1981 | + | UGAACACCAGUGAGUAGA | 18 | 4828 |
| CCR5-1982 | + | AUGAACACCAGUGAGUAGA | 19 | 4829 |
| CCR5-880 | + | GAUGAACACCAGUGAGUAGA | 20 | 4830 |
| CCR5-1983 | + | AGAUGAACACCAGUGAGUAGA | 21 | 4831 |
| CCR5-1984 | + | AAGAUGAACACCAGUGAGUAGA | 22 | 4832 |
| CCR5-1985 | + | AAAGAUGAACACCAGUGAGUAGA | 23 | 4833 |
| CCR5-1986 | + | CAAAGAUGAACACCAGUGAGUAGA | 24 | 4834 |
| CCR5-1987 | + | CCACUGGGCGGCAGCAUA | 18 | 4835 |
| CCR5-1988 | + | CCCACUGGGCGGCAGCAUA | 19 | 4836 |
| CCR5-864 | + | UCCCACUGGGCGGCAGCAUA | 20 | 4837 |
| CCR5-1989 | + | GUCCCACUGGGCGGCAGCAUA | 21 | 4838 |
| CCR5-1990 | + | AGUCCCACUGGGCGGCAGCAUA | 22 | 4839 |
| CCR5-1991 | + | AAGUCCCACUGGGCGGCAGCAUA | 23 | 4840 |
| CCR5-1992 | + | AAAGUCCCACUGGGCGGCAGCAUA | 24 | 4841 |
| CCR5-1993 | + | GCGGCAGCAUAGUGAGCC | 18 | 4842 |
| CCR5-1994 | + | GGCGGCAGCAUAGUGAGCC | 19 | 4843 |
| CCR5-865 | + | GGGCGGCAGCAUAGUGAGCC | 20 | 4844 |
| CCR5-1995 | + | UGGGCGGCAGCAUAGUGAGCC | 21 | 4845 |
| CCR5-1996 | + | CUGGGCGGCAGCAUAGUGAGCC | 22 | 4846 |
| CCR5-1997 | + | ACUGGGCGGCAGCAUAGUGAGCC | 23 | 4847 |
| CCR5-1998 | + | CACUGGGCGGCAGCAUAGUGAGCC | 24 | 4848 |
| CCR5-1999 | + | UCUGGUAAAGAUGAUUCC | 18 | 4849 |
| CCR5-2000 | + | AUCUGGUAAAGAUGAUUCC | 19 | 4850 |
| CCR5-1874 | + | GAUCUGGUAAAGAUGAUUCC | 20 | 4851 |
| CCR5-2001 | + | AGAUCUGGUAAAGAUGAUUCC | 21 | 4852 |
| CCR5-2002 | + | GAGAUCUGGUAAAGAUGAUUCC | 22 | 4853 |
| CCR5-2003 | + | UGAGAUCUGGUAAAGAUGAUUCC | 23 | 4854 |
| CCR5-2004 | + | UUGAGAUCUGGUAAAGAUGAUUCC | 24 | 4855 |
| CCR5-2005 | + | UUUUAAAGCAAACACAGC | 18 | 4856 |
| CCR5-2006 | + | CUUUUAAAGCAAACACAGC | 19 | 4857 |
| CCR5-852 | + | GCUUUUAAAGCAAACACAGC | 20 | 4858 |
| CCR5-2007 | + | GGCUUUUAAAGCAAACACAGC | 21 | 4859 |
| CCR5-2008 | + | UGGCUUUUAAAGCAAACACAGC | 22 | 4860 |
| CCR5-2009 | + | CUGGCUUUUAAAGCAAACACAGC | 23 | 4861 |
| CCR5-2010 | + | CCUGGCUUUUAAAGCAAACACAGC | 24 | 4862 |
| CCR5-2011 | + | AGUGAGUAGAGCGGAGGC | 18 | 4863 |
| CCR5-2012 | + | CAGUGAGUAGAGCGGAGGC | 19 | 4864 |
| CCR5-98 | + | CCAGUGAGUAGAGCGGAGGC | 20 | 4865 |
| CCR5-2013 | + | ACCAGUGAGUAGAGCGGAGGC | 21 | 4866 |
| CCR5-2014 | + | CACCAGUGAGUAGAGCGGAGGC | 22 | 4867 |
| CCR5-2015 | + | ACACCAGUGAGUAGAGCGGAGGC | 23 | 4868 |
| CCR5-2016 | + | AACACCAGUGAGUAGAGCGGAGGC | 24 | 4869 |
| CCR5-2017 | + | AGGUACCUAUCGAUUGUC | 18 | 4870 |
| CCR5-2018 | + | CAGGUACCUAUCGAUUGUC | 19 | 4871 |
| CCR5-60 | + | CCAGGUACCUAUCGAUUGUC | 20 | 4872 |
| CCR5-2019 | + | GCCAGGUACCUAUCGAUUGUC | 21 | 4873 |
| CCR5-2020 | + | AGCCAGGUACCUAUCGAUUGUC | 22 | 4874 |
| CCR5-2021 | + | CAGCCAGGUACCUAUCGAUUGUC | 23 | 4875 |
| CCR5-2022 | + | ACAGCCAGGUACCUAUCGAUUGUC | 24 | 4876 |
| CCR5-2023 | + | GGAUGAUGAAGAAGAUUC | 18 | 4877 |
| CCR5-2024 | + | AGGAUGAUGAAGAAGAUUC | 19 | 4878 |
| CCR5-858 | + | GAGGAUGAUGAAGAAGAUUC | 20 | 4879 |
| CCR5-2025 | + | GGAGGAUGAUGAAGAAGAUUC | 21 | 4880 |
| CCR5-2026 | + | AGGAGGAUGAUGAAGAAGAUUC | 22 | 4881 |
| CCR5-2027 | + | CAGGAGGAUGAUGAAGAAGAUUC | 23 | 4882 |
| CCR5-2028 | + | UCAGGAGGAUGAUGAAGAAGAUUC | 24 | 4883 |
| CCR5-2029 | + | AUCUGGUAAAGAUGAUUC | 18 | 4884 |
| CCR5-2030 | + | GAUCUGGUAAAGAUGAUUC | 19 | 4885 |
| CCR5-2031 | + | AGAUCUGGUAAAGAUGAUUC | 20 | 4886 |
| CCR5-2032 | + | GAGAUCUGGUAAAGAUGAUUC | 21 | 4887 |
| CCR5-2033 | + | UGAGAUCUGGUAAAGAUGAUUC | 22 | 4888 |
| CCR5-2034 | + | UUGAGAUCUGGUAAAGAUGAUUC | 23 | 4889 |
| CCR5-2035 | + | UUUGAGAUCUGGUAAAGAUGAUUC | 24 | 4890 |
| CCR5-2036 | + | UUGCCCACAAAACCAAAG | 18 | 4891 |
| CCR5-2037 | + | GUUGCCCACAAAACCAAAG | 19 | 4892 |
| CCR5-877 | + | UGUUGCCCACAAAACCAAAG | 20 | 4893 |
| CCR5-2038 | + | AUGUUGCCCACAAAACCAAAG | 21 | 4894 |
| CCR5-2039 | + | CAUGUUGCCCACAAAACCAAAG | 22 | 4895 |
| CCR5-2040 | + | GCAUGUUGCCCACAAAACCAAAG | 23 | 4896 |
| CCR5-2041 | + | AGCAUGUUGCCCACAAAACCAAAG | 24 | 4897 |
| CCR5-2042 | + | CCAGAAGGGGACAGUAAG | 18 | 4898 |
| CCR5-2043 | + | CCCAGAAGGGGACAGUAAG | 19 | 4899 |
| CCR5-870 | + | GCCCAGAAGGGGACAGUAAG | 20 | 4900 |
| CCR5-2044 | + | AGCCCAGAAGGGGACAGUAAG | 21 | 4901 |
| CCR5-2045 | + | GAGCCCAGAAGGGGACAGUAAG | 22 | 4902 |
| CCR5-2046 | + | UGAGCCCAGAAGGGGACAGUAAG | 23 | 4903 |
| CCR5-2047 | + | GUGAGCCCAGAAGGGGACAGUAAG | 24 | 4904 |
| CCR5-2048 | + | GCAGCAUAGUGAGCCCAG | 18 | 4905 |
| CCR5-2049 | + | GGCAGCAUAGUGAGCCCAG | 19 | 4906 |
| CCR5-866 | + | CGGCAGCAUAGUGAGCCCAG | 20 | 4907 |
| CCR5-2050 | + | GCGGCAGCAUAGUGAGCCCAG | 21 | 4908 |
| CCR5-2051 | + | GGCGGCAGCAUAGUGAGCCCAG | 22 | 4909 |
| CCR5-2052 | + | GGGCGGCAGCAUAGUGAGCCCAG | 23 | 4910 |
| CCR5-2053 | + | UGGGCGGCAGCAUAGUGAGCCCAG | 24 | 4911 |
| CCR5-2054 | + | AUGAAGAAGAUUCCAGAG | 18 | 4912 |
| CCR5-2055 | + | GAUGAAGAAGAUUCCAGAG | 19 | 4913 |
| CCR5-860 | + | UGAUGAAGAAGAUUCCAGAG | 20 | 4914 |
| CCR5-2056 | + | AUGAUGAAGAAGAUUCCAGAG | 21 | 4915 |
| CCR5-2057 | + | GAUGAUGAAGAAGAUUCCAGAG | 22 | 4916 |
| CCR5-2058 | + | GGAUGAUGAAGAAGAUUCCAGAG | 23 | 4917 |
| CCR5-2059 | + | AGGAUGAUGAAGAAGAUUCCAGAG | 24 | 4918 |
| CCR5-2060 | + | GAACACCAGUGAGUAGAG | 18 | 4919 |
| CCR5-2061 | + | UGAACACCAGUGAGUAGAG | 19 | 4920 |
| CCR5-92 | + | AUGAACACCAGUGAGUAGAG | 20 | 4921 |
| CCR5-2062 | + | GAUGAACACCAGUGAGUAGAG | 21 | 4922 |
| CCR5-2063 | + | AGAUGAACACCAGUGAGUAGAG | 22 | 4923 |
| CCR5-2064 | + | AAGAUGAACACCAGUGAGUAGAG | 23 | 4924 |
| CCR5-2065 | + | AAAGAUGAACACCAGUGAGUAGAG | 24 | 4925 |
| CCR5-2066 | + | GUAGAGCGGAGGCAGGAG | 18 | 4926 |
| CCR5-2067 | + | AGUAGAGCGGAGGCAGGAG | 19 | 4927 |
| CCR5-884 | + | GAGUAGAGCGGAGGCAGGAG | 20 | 4928 |
| CCR5-2068 | + | UGAGUAGAGCGGAGGCAGGAG | 21 | 4929 |
| CCR5-2069 | + | GUGAGUAGAGCGGAGGCAGGAG | 22 | 4930 |
| CCR5-2070 | + | AGUGAGUAGAGCGGAGGCAGGAG | 23 | 4931 |
| CCR5-2071 | + | CAGUGAGUAGAGCGGAGGCAGGAG | 24 | 4932 |
| CCR5-2072 | + | AAGAUGAACACCAGUGAG | 18 | 4933 |
| CCR5-2073 | + | AAAGAUGAACACCAGUGAG | 19 | 4934 |
| CCR5-879 | + | CAAAGAUGAACACCAGUGAG | 20 | 4935 |
| CCR5-2074 | + | CCAAAGAUGAACACCAGUGAG | 21 | 4936 |
| CCR5-2075 | + | ACCAAAGAUGAACACCAGUGAG | 22 | 4937 |
| CCR5-2076 | + | AACCAAAGAUGAACACCAGUGAG | 23 | 4938 |
| CCR5-2077 | + | AAACCAAAGAUGAACACCAGUGAG | 24 | 4939 |
| CCR5-2078 | + | AGGUCAGAGAUGGCCAGG | 18 | 4940 |
| CCR5-2079 | + | CAGGUCAGAGAUGGCCAGG | 19 | 4941 |
| CCR5-873 | + | ACAGGUCAGAGAUGGCCAGG | 20 | 4942 |
| CCR5-2080 | + | AACAGGUCAGAGAUGGCCAGG | 21 | 4943 |
| CCR5-2081 | + | AAACAGGUCAGAGAUGGCCAGG | 22 | 4944 |
| CCR5-2082 | + | AAAACAGGUCAGAGAUGGCCAGG | 23 | 4945 |
| CCR5-2083 | + | AAAAACAGGUCAGAGAUGGCCAGG | 24 | 4946 |
| CCR5-2084 | + | CUUUUGCAGUUUAUCAGG | 18 | 4947 |
| CCR5-2085 | + | CCUUUUGCAGUUUAUCAGG | 19 | 4948 |
| CCR5-875 | + | GCCUUUUGCAGUUUAUCAGG | 20 | 4949 |
| CCR5-2086 | + | AGCCUUUUGCAGUUUAUCAGG | 21 | 4950 |
| CCR5-2087 | + | CAGCCUUUUGCAGUUUAUCAGG | 22 | 4951 |
| CCR5-2088 | + | UCAGCCUUUUGCAGUUUAUCAGG | 23 | 4952 |
| CCR5-2089 | + | UUCAGCCUUUUGCAGUUUAUCAGG | 24 | 4953 |
| CCR5-2090 | + | CAGUGAGUAGAGCGGAGG | 18 | 4954 |
| CCR5-2091 | + | CCAGUGAGUAGAGCGGAGG | 19 | 4955 |
| CCR5-882 | + | ACCAGUGAGUAGAGCGGAGG | 20 | 4956 |
| CCR5-2092 | + | CACCAGUGAGUAGAGCGGAGG | 21 | 4957 |
| CCR5-2093 | + | ACACCAGUGAGUAGAGCGGAGG | 22 | 4958 |
| CCR5-2094 | + | AACACCAGUGAGUAGAGCGGAGG | 23 | 4959 |
| CCR5-2095 | + | GAACACCAGUGAGUAGAGCGGAGG | 24 | 4960 |
| CCR5-2096 | + | GGUAAAGAUGAUUCCUGG | 18 | 4961 |
| CCR5-2097 | + | UGGUAAAGAUGAUUCCUGG | 19 | 4962 |
| CCR5-2098 | + | CUGGUAAAGAUGAUUCCUGG | 20 | 4963 |
| CCR5-2099 | + | UCUGGUAAAGAUGAUUCCUGG | 21 | 4964 |
| CCR5-2100 | + | AUCUGGUAAAGAUGAUUCCUGG | 22 | 4965 |
| CCR5-2101 | + | GAUCUGGUAAAGAUGAUUCCUGG | 23 | 4966 |
| CCR5-2102 | + | AGAUCUGGUAAAGAUGAUUCCUGG | 24 | 4967 |
| CCR5-2103 | + | UUCACAUUGAUUUUUUGG | 18 | 4968 |
| CCR5-2104 | + | CUUCACAUUGAUUUUUUGG | 19 | 4969 |
| CCR5-885 | + | GCUUCACAUUGAUUUUUUGG | 20 | 4970 |
| CCR5-2105 | + | UGCUUCACAUUGAUUUUUUGG | 21 | 4971 |
| CCR5-2106 | + | UUGCUUCACAUUGAUUUUUUGG | 22 | 4972 |
| CCR5-2107 | + | UUUGCUUCACAUUGAUUUUUUGG | 23 | 4973 |
| CCR5-2108 | + | AUUUGCUUCACAUUGAUUUUUUGG | 24 | 4974 |
| CCR5-2109 | + | UCGAUUGUCAGGAGGAUG | 18 | 4975 |
| CCR5-2110 | + | AUCGAUUGUCAGGAGGAUG | 19 | 4976 |
| CCR5-856 | + | UAUCGAUUGUCAGGAGGAUG | 20 | 4977 |
| CCR5-2111 | + | CUAUCGAUUGUCAGGAGGAUG | 21 | 4978 |
| CCR5-2112 | + | CCUAUCGAUUGUCAGGAGGAUG | 22 | 4979 |
| CCR5-2113 | + | ACCUAUCGAUUGUCAGGAGGAUG | 23 | 4980 |
| CCR5-2114 | + | UACCUAUCGAUUGUCAGGAGGAUG | 24 | 4981 |
| CCR5-2115 | + | AUUGUCAGGAGGAUGAUG | 18 | 4982 |
| CCR5-2116 | + | GAUUGUCAGGAGGAUGAUG | 19 | 4983 |
| CCR5-857 | + | CGAUUGUCAGGAGGAUGAUG | 20 | 4984 |
| CCR5-2117 | + | UCGAUUGUCAGGAGGAUGAUG | 21 | 4985 |
| CCR5-2118 | + | AUCGAUUGUCAGGAGGAUGAUG | 22 | 4986 |
| CCR5-2119 | + | UAUCGAUUGUCAGGAGGAUGAUG | 23 | 4987 |
| CCR5-2120 | + | CUAUCGAUUGUCAGGAGGAUGAUG | 24 | 4988 |
| CCR5-2121 | + | CUGGUAAAGAUGAUUCCU | 18 | 4989 |
| CCR5-2122 | + | UCUGGUAAAGAUGAUUCCU | 19 | 4990 |
| CCR5-1877 | + | AUCUGGUAAAGAUGAUUCCU | 20 | 4991 |
| CCR5-2123 | + | GAUCUGGUAAAGAUGAUUCCU | 21 | 4992 |
| CCR5-2124 | + | AGAUCUGGUAAAGAUGAUUCCU | 22 | 4993 |
| CCR5-2125 | + | GAGAUCUGGUAAAGAUGAUUCCU | 23 | 4994 |
| CCR5-2126 | + | UGAGAUCUGGUAAAGAUGAUUCCU | 24 | 4995 |
| CCR5-2127 | + | AGCCCAGAAGGGGACAGU | 18 | 4996 |
| CCR5-2128 | + | GAGCCCAGAAGGGGACAGU | 19 | 4997 |
| CCR5-869 | + | UGAGCCCAGAAGGGGACAGU | 20 | 4998 |
| CCR5-2129 | + | GUGAGCCCAGAAGGGGACAGU | 21 | 4999 |
| CCR5-2130 | + | AGUGAGCCCAGAAGGGGACAGU | 22 | 5000 |
| CCR5-2131 | + | UAGUGAGCCCAGAAGGGGACAGU | 23 | 5001 |
| CCR5-2132 | + | AUAGUGAGCCCAGAAGGGGACAGU | 24 | 5002 |
| CCR5-2133 | + | UAAGAAGGAAAAACAGGU | 18 | 5003 |
| CCR5-2134 | + | GUAAGAAGGAAAAACAGGU | 19 | 5004 |
| CCR5-872 | + | AGUAAGAAGGAAAAACAGGU | 20 | 5005 |
| CCR5-2135 | + | CAGUAAGAAGGAAAAACAGGU | 21 | 5006 |
| CCR5-2136 | + | ACAGUAAGAAGGAAAAACAGGU | 22 | 5007 |
| CCR5-2137 | + | GACAGUAAGAAGGAAAAACAGGU | 23 | 5008 |
| CCR5-2138 | + | GGACAGUAAGAAGGAAAAACAGGU | 24 | 5009 |
| CCR5-2139 | + | CAGGUACCUAUCGAUUGU | 18 | 5010 |
| CCR5-2140 | + | CCAGGUACCUAUCGAUUGU | 19 | 5011 |
| CCR5-853 | + | GCCAGGUACCUAUCGAUUGU | 20 | 5012 |
| CCR5-2141 | + | AGCCAGGUACCUAUCGAUUGU | 21 | 5013 |
| CCR5-2142 | + | CAGCCAGGUACCUAUCGAUUGU | 22 | 5014 |
| CCR5-2143 | + | ACAGCCAGGUACCUAUCGAUUGU | 23 | 5015 |
| CCR5-2144 | + | GACAGCCAGGUACCUAUCGAUUGU | 24 | 5016 |
| CCR5-2145 | + | GUAAUGAAGACCUUCUUU | 18 | 5017 |
| CCR5-2146 | + | UGUAAUGAAGACCUUCUUU | 19 | 5018 |
| CCR5-1657 | + | GUGUAAUGAAGACCUUCUUU | 20 | 5019 |
| CCR5-2147 | − | UCUUUACCAGAUCUCAAA | 18 | 5020 |
| CCR5-2148 | − | AUCUUUACCAGAUCUCAAA | 19 | 5021 |
| CCR5-2149 | − | CAUCUUUACCAGAUCUCAAA | 20 | 5022 |
| CCR5-2150 | − | UCAUCUUUACCAGAUCUCAAA | 21 | 5023 |
| CCR5-2151 | − | AUCAUCUUUACCAGAUCUCAAA | 22 | 5024 |
| CCR5-2152 | − | AAUCAUCUUUACCAGAUCUCAAA | 23 | 5025 |
| CCR5-2153 | − | GAAUCAUCUUUACCAGAUCUCAAA | 24 | 5026 |
| CCR5-2154 | − | GACAUCAAUUAUUAUACA | 18 | 5027 |
| CCR5-2155 | − | UGACAUCAAUUAUUAUACA | 19 | 5028 |
| CCR5-812 | − | AUGACAUCAAUUAUUAUACA | 20 | 5029 |
| CCR5-2156 | − | UAUGACAUCAAUUAUUAUACA | 21 | 5030 |
| CCR5-2157 | − | CUAUGACAUCAAUUAUUAUACA | 22 | 5031 |
| CCR5-2158 | − | UCUAUGACAUCAAUUAUUAUACA | 23 | 5032 |
| CCR5-2159 | − | AUCUAUGACAUCAAUUAUUAUACA | 24 | 5033 |
| CCR5-2160 | − | UCACUAUGCUGCCGCCCA | 18 | 5034 |
| CCR5-2161 | − | CUCACUAUGCUGCCGCCCA | 19 | 5035 |
| CCR5-819 | − | GCUCACUAUGCUGCCGCCCA | 20 | 5036 |
| CCR5-2162 | − | GGCUCACUAUGCUGCCGCCCA | 21 | 5037 |
| CCR5-2163 | − | GGGCUCACUAUGCUGCCGCCCA | 22 | 5038 |
| CCR5-2164 | − | UGGGCUCACUAUGCUGCCGCCCA | 23 | 5039 |
| CCR5-2165 | − | CUGGGCUCACUAUGCUGCCGCCCA | 24 | 5040 |
| CCR5-2166 | − | CAAUGUGUCAACUCUUGA | 18 | 5041 |
| CCR5-2167 | − | ACAAUGUGUCAACUCUUGA | 19 | 5042 |
| CCR5-823 | − | UACAAUGUGUCAACUCUUGA | 20 | 5043 |
| CCR5-2168 | − | AUACAAUGUGUCAACUCUUGA | 21 | 5044 |
| CCR5-2169 | − | AAUACAAUGUGUCAACUCUUGA | 22 | 5045 |
| CCR5-2170 | − | AAAUACAAUGUGUCAACUCUUGA | 23 | 5046 |
| CCR5-2171 | − | GAAAUACAAUGUGUCAACUCUUGA | 24 | 5047 |
| CCR5-2172 | − | CUGUGUUUGCGUCUCUCC | 18 | 5048 |
| CCR5-2173 | − | GCUGUGUUUGCGUCUCUCC | 19 | 5049 |
| CCR5-830 | − | GGCUGUGUUUGCGUCUCUCC | 20 | 5050 |
| CCR5-2174 | − | UGGCUGUGUUUGCGUCUCUCC | 21 | 5051 |
| CCR5-2175 | − | GUGGCUGUGUUUGCGUCUCUCC | 22 | 5052 |
| CCR5-2176 | − | GGUGGCUGUGUUUGCGUCUCUCC | 23 | 5053 |
| CCR5-2177 | − | UGGUGGCUGUGUUUGCGUCUCUCC | 24 | 5054 |
| CCR5-2178 | − | UGUGUUUGCUUUAAAAGC | 18 | 5055 |
| CCR5-2179 | − | CUGUGUUUGCUUUAAAAGC | 19 | 5056 |
| CCR5-826 | − | GCUGUGUUUGCUUUAAAAGC | 20 | 5057 |
| CCR5-2180 | − | UGCUGUGUUUGCUUUAAAAGC | 21 | 5058 |
| CCR5-2181 | − | AUGCUGUGUUUGCUUUAAAAGC | 22 | 5059 |
| CCR5-2182 | − | CAUGCUGUGUUUGCUUUAAAAGC | 23 | 5060 |
| CCR5-2183 | − | CCAUGCUGUGUUUGCUUUAAAAGC | 24 | 5061 |
| CCR5-2184 | − | CACUAUGCUGCCGCCCAG | 18 | 5062 |
| CCR5-2185 | − | UCACUAUGCUGCCGCCCAG | 19 | 5063 |
| CCR5-74 | − | CUCACUAUGCUGCCGCCCAG | 20 | 5064 |
| CCR5-2186 | − | GCUCACUAUGCUGCCGCCCAG | 21 | 5065 |
| CCR5-2187 | − | GGCUCACUAUGCUGCCGCCCAG | 22 | 5066 |
| CCR5-2188 | − | GGGCUCACUAUGCUGCCGCCCAG | 23 | 5067 |
| CCR5-2189 | − | UGGGCUCACUAUGCUGCCGCCCAG | 24 | 5068 |
| CCR5-2190 | − | CUGAUAAACUGCAAAAGG | 18 | 5069 |
| CCR5-2191 | − | CCUGAUAAACUGCAAAAGG | 19 | 5070 |
| CCR5-816 | − | UCCUGAUAAACUGCAAAAGG | 20 | 5071 |
| CCR5-2192 | − | AUCCUGAUAAACUGCAAAAGG | 21 | 5072 |
| CCR5-2193 | − | CAUCCUGAUAAACUGCAAAAGG | 22 | 5073 |
| CCR5-2194 | − | UCAUCCUGAUAAACUGCAAAAGG | 23 | 5074 |
| CCR5-2195 | − | CUCAUCCUGAUAAACUGCAAAAGG | 24 | 5075 |
| CCR5-2196 | − | UUUUUAUUUAUGCACAGG | 18 | 5076 |
| CCR5-2197 | − | CUUUUUAUUUAUGCACAGG | 19 | 5077 |
| CCR5-2198 | − | ACUUUUUAUUUAUGCACAGG | 20 | 5078 |
| CCR5-2199 | − | UUUUAUUUAUGCACAGGG | 18 | 5079 |
| CCR5-2200 | − | UUUUUAUUUAUGCACAGGG | 19 | 5080 |
| CCR5-1876 | − | CUUUUUAUUUAUGCACAGGG | 20 | 5081 |
| CCR5-2201 | − | AUAAACUGCAAAAGGCUG | 18 | 5082 |
| CCR5-2202 | − | GAUAAACUGCAAAAGGCUG | 19 | 5083 |
| CCR5-817 | − | UGAUAAACUGCAAAAGGCUG | 20 | 5084 |
| CCR5-2203 | − | CUGAUAAACUGCAAAAGGCUG | 21 | 5085 |
| CCR5-2204 | − | CCUGAUAAACUGCAAAAGGCUG | 22 | 5086 |
| CCR5-2205 | − | UCCUGAUAAACUGCAAAAGGCUG | 23 | 5087 |
| CCR5-2206 | − | AUCCUGAUAAACUGCAAAAGGCUG | 24 | 5088 |
| CCR5-2207 | − | CCCUGCCAAAAAAUCAAU | 18 | 5089 |
| CCR5-2208 | − | GCCCUGCCAAAAAAUCAAU | 19 | 5090 |
| CCR5-814 | − | AGCCCUGCCAAAAAAUCAAU | 20 | 5091 |
| CCR5-2209 | − | GAGCCCUGCCAAAAAAUCAAU | 21 | 5092 |
| CCR5-2210 | − | GGAGCCCUGCCAAAAAAUCAAU | 22 | 5093 |
| CCR5-2211 | − | CGGAGCCCUGCCAAAAAAUCAAU | 23 | 5094 |
| CCR5-2212 | − | UCGGAGCCCUGCCAAAAAAUCAAU | 24 | 5095 |
| CCR5-2213 | − | ACAUCAAUUAUUAUACAU | 18 | 5096 |
| CCR5-2214 | − | GACAUCAAUUAUUAUACAU | 19 | 5097 |
| CCR5-67 | − | UGACAUCAAUUAUUAUACAU | 20 | 5098 |
| CCR5-2215 | − | AUGACAUCAAUUAUUAUACAU | 21 | 5099 |
| CCR5-2216 | − | UAUGACAUCAAUUAUUAUACAU | 22 | 5100 |
| CCR5-2217 | − | CUAUGACAUCAAUUAUUAUACAU | 23 | 5101 |
| CCR5-2218 | − | UCUAUGACAUCAAUUAUUAUACAU | 24 | 5102 |
| CCR5-2219 | − | CUGCCGCCCAGUGGGACU | 18 | 5103 |
| CCR5-2220 | − | GCUGCCGCCCAGUGGGACU | 19 | 5104 |
| CCR5-821 | − | UGCUGCCGCCCAGUGGGACU | 20 | 5105 |
| CCR5-2221 | − | AUGCUGCCGCCCAGUGGGACU | 21 | 5106 |
| CCR5-2222 | − | UAUGCUGCCGCCCAGUGGGACU | 22 | 5107 |
| CCR5-2223 | − | CUAUGCUGCCGCCCAGUGGGACU | 23 | 5108 |
| CCR5-2224 | − | ACUAUGCUGCCGCCCAGUGGGACU | 24 | 5109 |
| CCR5-2225 | − | AAGCCAGGACGGUCACCU | 18 | 5110 |
| CCR5-2226 | − | AAAGCCAGGACGGUCACCU | 19 | 5111 |
| CCR5-827 | − | AAAAGCCAGGACGGUCACCU | 20 | 5112 |
| CCR5-2227 | − | UAAAAGCCAGGACGGUCACCU | 21 | 5113 |
| CCR5-2228 | − | UUAAAAGCCAGGACGGUCACCU | 22 | 5114 |
| CCR5-2229 | − | UUUAAAAGCCAGGACGGUCACCU | 23 | 5115 |
| CCR5-2230 | − | CUUUAAAAGCCAGGACGGUCACCU | 24 | 5116 |
| CCR5-2231 | − | AUUUUAUAGGCUUCUUCU | 18 | 5117 |
| CCR5-2232 | − | UAUUUUAUAGGCUUCUUCU | 19 | 5118 |
| CCR5-824 | − | CUAUUUUAUAGGCUUCUUCU | 20 | 5119 |
| CCR5-2233 | − | UCUAUUUUAUAGGCUUCUUCU | 21 | 5120 |
| CCR5-2234 | − | CUCUAUUUUAUAGGCUUCUUCU | 22 | 5121 |
| CCR5-2235 | − | GCUCUAUUUUAUAGGCUUCUUCU | 23 | 5122 |
| CCR5-2236 | − | GGCUCUAUUUUAUAGGCUUCUUCU | 24 | 5123 |
| CCR5-2237 | − | UGCCGCCCAGUGGGACUU | 18 | 5124 |
| CCR5-2238 | − | CUGCCGCCCAGUGGGACUU | 19 | 5125 |
| CCR5-43 | − | GCUGCCGCCCAGUGGGACUU | 20 | 5126 |
| CCR5-2239 | − | UGCUGCCGCCCAGUGGGACUU | 21 | 5127 |
| CCR5-2240 | − | AUGCUGCCGCCCAGUGGGACUU | 22 | 5128 |
| CCR5-2241 | − | UAUGCUGCCGCCCAGUGGGACUU | 23 | 5129 |
| CCR5-2242 | − | CUAUGCUGCCGCCCAGUGGGACUU | 24 | 5130 |
| CCR5-2243 | − | CCUUCUUACUGUCCCCUU | 18 | 5131 |
| CCR5-2244 | − | UCCUUCUUACUGUCCCCUU | 19 | 5132 |
| CCR5-818 | − | UUCCUUCUUACUGUCCCCUU | 20 | 5133 |
| CCR5-2245 | − | UUUCCUUCUUACUGUCCCCUU | 21 | 5134 |
| CCR5-2246 | − | UUUUCCUUCUUACUGUCCCCUU | 22 | 5135 |
| CCR5-2247 | − | UUUUUCCUUCUUACUGUCCCCUU | 23 | 5136 |
| CCR5-2248 | − | GUUUUUCCUUCUUACUGUCCCCUU | 24 | 5137 |
| CCR5-2249 | − | GUGUUCAUCUUUGGUUUU | 18 | 5138 |
| CCR5-2250 | − | GGUGUUCAUCUUUGGUUUU | 19 | 5139 |
| CCR5-815 | − | UGGUGUUCAUCUUUGGUUUU | 20 | 5140 |
| CCR5-2251 | − | CUGGUGUUCAUCUUUGGUUUU | 21 | 5141 |
| CCR5-2252 | − | ACUGGUGUUCAUCUUUGGUUUU | 22 | 5142 |
| CCR5-2253 | − | CACUGGUGUUCAUCUUUGGUUUU | 23 | 5143 |
| CCR5-2254 | − | UCACUGGUGUUCAUCUUUGGUUUU | 24 | 5144 |

[0658] Table 3E provides exemplary targeting domains for knocking out the CCR5 gene selected according to the fifth tier parameters. The targeting domains fall in the coding sequence of the gene, downstream of the first 500 bp of coding sequence (e.g., anywhere from +500 (relative to the start codon) to the stop codon of the gene and PAM is NNGRRV. It is contemplated herein that in an embodiment the targeting domain hybridizes to the target domain through complementary base pairing. Any of the targeting domains in the table can be used with a S. aureus Cas9 molecule that generates a double stranded break (Cas9 nuclease) or a single-stranded break (Cas9 nickase).

TABLE 3E
5th Tier

| gRNA | DNA | | Target Site | SEQ ID |
|---|---|---|---|---|
| Name | Strand | Targeting Domain | Length | NO |
| CCR5-2339 | + | GAGCCUCUUGCUGGAAAA | 18 | 5145 |
| CCR5-2340 | + | GGAGCCUCUUGCUGGAAAA | 19 | 5146 |
| CCR5-1619 | + | GGGAGCCUCUUGCUGGAAAA | 20 | 5147 |
| CCR5-2341 | + | CGGGAGCCUCUUGCUGGAAAA | 21 | 5148 |
| CCR5-2342 | + | UCGGGAGCCUCUUGCUGGAAAA | 22 | 5149 |
| CCR5-2343 | + | CUCGGGAGCCUCUUGCUGGAAAA | 23 | 5150 |
| CCR5-2344 | + | GCUCGGGAGCCUCUUGCUGGAAAA | 24 | 5151 |
| CCR5-2345 | + | AUACUGACUGUAUGGAAA | 18 | 5152 |
| CCR5-2346 | + | GAUACUGACUGUAUGGAAA | 19 | 5153 |
| CCR5-1654 | + | UGAUACUGACUGUAUGGAAA | 20 | 5154 |
| CCR5-2347 | + | UUGAUACUGACUGUAUGGAAA | 21 | 5155 |
| CCR5-2348 | + | AUUGAUACUGACUGUAUGGAAA | 22 | 5156 |
| CCR5-2349 | + | AAUUGAUACUGACUGUAUGGAAA | 23 | 5157 |
| CCR5-2350 | + | GAAUUGAUACUGACUGUAUGGAAA | 24 | 5158 |
| CCR5-2351 | + | CAGUGGAUCGGGUGUAAA | 18 | 5159 |
| CCR5-2352 | + | CCAGUGGAUCGGGUGUAAA | 19 | 5160 |
| CCR5-1613 | + | CCCAGUGGAUCGGGUGUAAA | 20 | 5161 |
| CCR5-2353 | + | CCCCAGUGGAUCGGGUGUAAA | 21 | 5162 |
| CCR5-2354 | + | UCCCCAGUGGAUCGGGUGUAAA | 22 | 5163 |
| CCR5-2355 | + | CUCCCCAGUGGAUCGGGUGUAAA | 23 | 5164 |
| CCR5-2356 | + | GCUCCCCAGUGGAUCGGGUGUAAA | 24 | 5165 |
| CCR5-2357 | + | GUUGUAGGGAGCCCAGAA | 18 | 5166 |
| CCR5-2358 | + | UGUUGUAGGGAGCCCAGAA | 19 | 5167 |
| CCR5-1642 | + | AUGUUGUAGGGAGCCCAGAA | 20 | 5168 |
| CCR5-2359 | + | AAUGUUGUAGGGAGCCCAGAA | 21 | 5169 |
| CCR5-2360 | + | CAAUGUUGUAGGGAGCCCAGAA | 22 | 5170 |
| CCR5-2361 | + | ACAAUGUUGUAGGGAGCCCAGAA | 23 | 5171 |
| CCR5-2362 | + | GACAAUGUUGUAGGGAGCCCAGAA | 24 | 5172 |
| CCR5-2363 | + | CUUCUUCUCAUUUCGACA | 18 | 5173 |
| CCR5-2364 | + | UCUUCUUCUCAUUUCGACA | 19 | 5174 |
| CCR5-1644 | + | CUCUUCUUCUCAUUUCGACA | 20 | 5175 |
| CCR5-2365 | + | CCUCUUCUUCUCAUUUCGACA | 21 | 5176 |
| CCR5-2366 | + | GCCUCUUCUUCUCAUUUCGACA | 22 | 5177 |
| CCR5-2367 | + | UGCCUCUUCUUCUCAUUUCGACA | 23 | 5178 |
| CCR5-2368 | + | GUGCCUCUUCUUCUCAUUUCGACA | 24 | 5179 |
| CCR5-2369 | + | GAAUUGAUACUGACUGUA | 18 | 5180 |
| CCR5-2370 | + | AGAAUUGAUACUGACUGUA | 19 | 5181 |
| CCR5-699 | + | CAGAAUUGAUACUGACUGUA | 20 | 5182 |
| CCR5-2371 | + | CCAGAAUUGAUACUGACUGUA | 21 | 5183 |
| CCR5-2372 | + | UCCAGAAUUGAUACUGACUGUA | 22 | 5184 |
| CCR5-2373 | + | UUCCAGAAUUGAUACUGACUGUA | 23 | 5185 |
| CCR5-2374 | + | CUUCCAGAAUUGAUACUGACUGUA | 24 | 5186 |
| CCR5-2375 | + | AUGAGAGCUGCAGGUGUA | 18 | 5187 |
| CCR5-2376 | + | AAUGAGAGCUGCAGGUGUA | 19 | 5188 |
| CCR5-1656 | + | AAAUGAGAGCUGCAGGUGUA | 20 | 5189 |
| CCR5-2377 | + | AAAAUGAGAGCUGCAGGUGUA | 21 | 5190 |
| CCR5-2378 | + | GAAAAUGAGAGCUGCAGGUGUA | 22 | 5191 |
| CCR5-2379 | + | GGAAAAUGAGAGCUGCAGGUGUA | 23 | 5192 |
| CCR5-2380 | + | UGGAAAAUGAGAGCUGCAGGUGUA | 24 | 5193 |
| CCR5-2381 | + | GAGAAGGACAAUGUUGUA | 18 | 5194 |
| CCR5-2382 | + | GGAGAAGGACAAUGUUGUA | 19 | 5195 |
| CCR5-693 | + | AGGAGAAGGACAAUGUUGUA | 20 | 5196 |
| CCR5-2383 | + | CAGGAGAAGGACAAUGUUGUA | 21 | 5197 |
| CCR5-2384 | + | UCAGGAGAAGGACAAUGUUGUA | 22 | 5198 |
| CCR5-2385 | + | UUCAGGAGAAGGACAAUGUUGUA | 23 | 5199 |
| CCR5-2386 | + | GUUCAGGAGAAGGACAAUGUUGUA | 24 | 5200 |
| CCR5-2387 | + | ACAAUGUUGUAGGGAGCC | 18 | 5201 |
| CCR5-2388 | + | GACAAUGUUGUAGGGAGCC | 19 | 5202 |
| CCR5-1640 | + | GGACAAUGUUGUAGGGAGCC | 20 | 5203 |
| CCR5-2389 | + | AGGACAAUGUUGUAGGGAGCC | 21 | 5204 |
| CCR5-2390 | + | AAGGACAAUGUUGUAGGGAGCC | 22 | 5205 |
| CCR5-2391 | + | GAAGGACAAUGUUGUAGGGAGCC | 23 | 5206 |
| CCR5-2392 | + | AGAAGGACAAUGUUGUAGGGAGCC | 24 | 5207 |
| CCR5-2393 | + | UUCAGGCCAAAGAAUUCC | 18 | 5208 |
| CCR5-2394 | + | AUUCAGGCCAAAGAAUUCC | 19 | 5209 |
| CCR5-688 | + | UAUUCAGGCCAAAGAAUUCC | 20 | 5210 |
| CCR5-2395 | + | UUAUUCAGGCCAAAGAAUUCC | 21 | 5211 |
| CCR5-2396 | + | AUUAUUCAGGCCAAAGAAUUCC | 22 | 5212 |
| CCR5-2397 | + | AAUUAUUCAGGCCAAAGAAUUCC | 23 | 5213 |
| CCR5-2398 | + | CAAUUAUUCAGGCCAAAGAAUUCC | 24 | 5214 |
| CCR5-1999 | + | UCUGGUAAAGAUGAUUCC | 18 | 5215 |
| CCR5-2000 | + | AUCUGGUAAAGAUGAUUCC | 19 | 5216 |
| CCR5-1874 | + | GAUCUGGUAAAGAUGAUUCC | 20 | 5217 |
| CCR5-2001 | + | AGAUCUGGUAAAGAUGAUUCC | 21 | 5218 |
| CCR5-2002 | + | GAGAUCUGGUAAAGAUGAUUCC | 22 | 5219 |
| CCR5-2003 | + | UGAGAUCUGGUAAAGAUGAUUCC | 23 | 5220 |
| CCR5-2004 | + | UUGAGAUCUGGUAAAGAUGAUUCC | 24 | 5221 |
| CCR5-2399 | + | UAAACUGAGCUUGCUCGC | 18 | 5222 |
| CCR5-2400 | + | GUAAACUGAGCUUGCUCGC | 19 | 5223 |
| CCR5-1614 | + | UGUAAACUGAGCUUGCUCGC | 20 | 5224 |
| CCR5-2401 | + | GUGUAAACUGAGCUUGCUCGC | 21 | 5225 |
| CCR5-2402 | + | GGUGUAAACUGAGCUUGCUCGC | 22 | 5226 |
| CCR5-2403 | + | GGGUGUAAACUGAGCUUGCUCGC | 23 | 5227 |
| CCR5-2404 | + | CGGGUGUAAACUGAGCUUGCUCGC | 24 | 5228 |
| CCR5-2405 | + | CGCUCGGGAGCCUCUUGC | 18 | 5229 |
| CCR5-2406 | + | UCGCUCGGGAGCCUCUUGC | 19 | 5230 |
| CCR5-678 | + | CUCGCUCGGGAGCCUCUUGC | 20 | 5231 |
| CCR5-2407 | + | GCUCGCUCGGGAGCCUCUUGC | 21 | 5232 |
| CCR5-2408 | + | UGCUCGCUCGGGAGCCUCUUGC | 22 | 5233 |
| CCR5-2409 | + | UUGCUCGCUCGGGAGCCUCUUGC | 23 | 5234 |
| CCR5-2410 | + | CUUGCUCGCUCGGGAGCCUCUUGC | 24 | 5235 |
| CCR5-2411 | + | AACUGAGCUUGCUCGCUC | 18 | 5236 |
| CCR5-2412 | + | AAACUGAGCUUGCUCGCUC | 19 | 5237 |
| CCR5-677 | + | UAAACUGAGCUUGCUCGCUC | 20 | 5238 |
| CCR5-2413 | + | GUAAACUGAGCUUGCUCGCUC | 21 | 5239 |
| CCR5-2414 | + | UGUAAACUGAGCUUGCUCGCUC | 22 | 5240 |
| CCR5-2415 | + | GUGUAAACUGAGCUUGCUCGCUC | 23 | 5241 |
| CCR5-2416 | + | GGUGUAAACUGAGCUUGCUCGCUC | 24 | 5242 |
| CCR5-2417 | + | AUGACUAUCUUUAAUGUC | 18 | 5243 |
| CCR5-2418 | + | GAUGACUAUCUUUAAUGUC | 19 | 5244 |
| CCR5-698 | + | AGAUGACUAUCUUUAAUGUC | 20 | 5245 |
| CCR5-2419 | + | AAGAUGACUAUCUUUAAUGUC | 21 | 5246 |
| CCR5-2420 | + | CAAGAUGACUAUCUUUAAUGUC | 22 | 5247 |
| CCR5-2421 | + | CCAAGAUGACUAUCUUUAAUGUC | 23 | 5248 |
| CCR5-2422 | + | CCCAAGAUGACUAUCUUUAAUGUC | 24 | 5249 |
| CCR5-2423 | + | AUUCAGGCCAAAGAAUUC | 18 | 5250 |
| CCR5-2424 | + | UAUUCAGGCCAAAGAAUUC | 19 | 5251 |
| CCR5-1631 | + | UUAUUCAGGCCAAAGAAUUC | 20 | 5252 |
| CCR5-2425 | + | AUUAUUCAGGCCAAAGAAUUC | 21 | 5253 |
| CCR5-2426 | + | AAUUAUUCAGGCCAAAGAAUUC | 22 | 5254 |
| CCR5-2427 | + | CAAUUAUUCAGGCCAAAGAAUUC | 23 | 5255 |
| CCR5-2428 | + | GCAAUUAUUCAGGCCAAAGAAUUC | 24 | 5256 |
| CCR5-2029 | + | AUCUGGUAAAGAUGAUUC | 18 | 5257 |
| CCR5-2030 | + | GAUCUGGUAAAGAUGAUUC | 19 | 5258 |
| CCR5-2031 | + | AGAUCUGGUAAAGAUGAUUC | 20 | 5259 |
| CCR5-2032 | + | GAGAUCUGGUAAAGAUGAUUC | 21 | 5260 |
| CCR5-2033 | + | UGAGAUCUGGUAAAGAUGAUUC | 22 | 5261 |
| CCR5-2034 | + | UUGAGAUCUGGUAAAGAUGAUUC | 23 | 5262 |
| CCR5-2035 | + | UUUGAGAUCUGGUAAAGAUGAUUC | 24 | 5263 |
| CCR5-2429 | + | AAUUCCUGGAAGGUGUUC | 18 | 5264 |
| CCR5-2430 | + | GAAUUCCUGGAAGGUGUUC | 19 | 5265 |
| CCR5-690 | + | AGAAUUCCUGGAAGGUGUUC | 20 | 5266 |
| CCR5-2431 | + | AAGAAUUCCUGGAAGGUGUUC | 21 | 5267 |
| CCR5-2432 | + | AAAGAAUUCCUGGAAGGUGUUC | 22 | 5268 |
| CCR5-2433 | + | CAAAGAAUUCCUGGAAGGUGUUC | 23 | 5269 |
| CCR5-2434 | + | CCAAAGAAUUCCUGGAAGGUGUUC | 24 | 5270 |
| CCR5-2435 | + | AUGUUGUAGGGAGCCCAG | 18 | 5271 |
| CCR5-2436 | + | AAUGUUGUAGGGAGCCCAG | 19 | 5272 |
| CCR5-1641 | + | CAAUGUUGUAGGGAGCCCAG | 20 | 5273 |
| CCR5-2437 | + | ACAAUGUUGUAGGGAGCCCAG | 21 | 5274 |
| CCR5-2438 | + | GACAAUGUUGUAGGGAGCCCAG | 22 | 5275 |
| CCR5-2439 | + | GGACAAUGUUGUAGGGAGCCCAG | 23 | 5276 |
| CCR5-2440 | + | AGGACAAUGUUGUAGGGAGCCCAG | 24 | 5277 |
| CCR5-2441 | + | UUCCUGGAAGGUGUUCAG | 18 | 5278 |
| CCR5-2442 | + | AUUCCUGGAAGGUGUUCAG | 19 | 5279 |
| CCR5-1635 | + | AAUUCCUGGAAGGUGUUCAG | 20 | 5280 |
| CCR5-2443 | + | GAAUUCCUGGAAGGUGUUCAG | 21 | 5281 |
| CCR5-2444 | + | AGAAUUCCUGGAAGGUGUUCAG | 22 | 5282 |
| CCR5-2445 | + | AAGAAUUCCUGGAAGGUGUUCAG | 23 | 5283 |
| CCR5-2446 | + | AAAGAAUUCCUGGAAGGUGUUCAG | 24 | 5284 |
| CCR5-2447 | + | CUGGAAGGUGUUCAGGAG | 18 | 5285 |
| CCR5-2448 | + | CCUGGAAGGUGUUCAGGAG | 19 | 5286 |
| CCR5-1636 | + | UCCUGGAAGGUGUUCAGGAG | 20 | 5287 |
| CCR5-2449 | + | UUCCUGGAAGGUGUUCAGGAG | 21 | 5288 |
| CCR5-2450 | + | AUUCCUGGAAGGUGUUCAGGAG | 22 | 5289 |
| CCR5-2451 | + | AAUUCCUGGAAGGUGUUCAGGAG | 23 | 5290 |
| CCR5-2452 | + | GAAUUCCUGGAAGGUGUUCAGGAG | 24 | 5291 |
| CCR5-2453 | + | GACCAUGACAAGCAGCGG | 18 | 5292 |
| CCR5-2454 | + | UGACCAUGACAAGCAGCGG | 19 | 5293 |
| CCR5-1648 | + | AUGACCAUGACAAGCAGCGG | 20 | 5294 |
| CCR5-2455 | + | GAUGACCAUGACAAGCAGCGG | 21 | 5295 |
| CCR5-2456 | + | AGAUGACCAUGACAAGCAGCGG | 22 | 5296 |
| CCR5-2457 | + | CAGAUGACCAUGACAAGCAGCGG | 23 | 5297 |
| CCR5-2458 | + | GCAGAUGACCAUGACAAGCAGCGG | 24 | 5298 |
| CCR5-2096 | + | GGUAAAGAUGAUUCCUGG | 18 | 5299 |
| CCR5-2097 | + | UGGUAAAGAUGAUUCCUGG | 19 | 5300 |
| CCR5-2098 | + | CUGGUAAAGAUGAUUCCUGG | 20 | 5301 |
| CCR5-2099 | + | UCUGGUAAAGAUGAUUCCUGG | 21 | 5302 |
| CCR5-2100 | + | AUCUGGUAAAGAUGAUUCCUGG | 22 | 5303 |
| CCR5-2101 | + | GAUCUGGUAAAGAUGAUUCCUGG | 23 | 5304 |
| CCR5-2102 | + | AGAUCUGGUAAAGAUGAUUCCUGG | 24 | 5305 |
| CCR5-2459 | + | UUGGCAAUGUGCUUUUGG | 18 | 5306 |
| CCR5-2460 | + | UUUGGCAAUGUGCUUUUGG | 19 | 5307 |
| CCR5-1623 | + | GUUUGGCAAUGUGCUUUUGG | 20 | 5308 |
| CCR5-2461 | + | CGUUUGGCAAUGUGCUUUUGG | 21 | 5309 |
| CCR5-2462 | + | GCGUUUGGCAAUGUGCUUUUGG | 22 | 5310 |
| CCR5-2463 | + | AGCGUUUGGCAAUGUGCUUUUGG | 23 | 5311 |
| CCR5-2464 | + | AAGCGUUUGGCAAUGUGCUUUUGG | 24 | 5312 |
| CCR5-2465 | + | CCGACAAAGGCAUAGAUG | 18 | 5313 |
| CCR5-2466 | + | CCCGACAAAGGCAUAGAUG | 19 | 5314 |
| CCR5-1626 | + | CCCCGACAAAGGCAUAGAUG | 20 | 5315 |
| CCR5-2467 | + | UCCCCGACAAAGGCAUAGAUG | 21 | 5316 |
| CCR5-2468 | + | CUCCCCGACAAAGGCAUAGAUG | 22 | 5317 |
| CCR5-2469 | + | UCUCCCCGACAAAGGCAUAGAUG | 23 | 5318 |
| CCR5-2470 | + | UUCUCCCCGACAAAGGCAUAGAUG | 24 | 5319 |
| CCR5-2471 | + | AAAUAAACAAUCAUGAUG | 18 | 5320 |
| CCR5-2472 | + | AAAAUAAACAAUCAUGAUG | 19 | 5321 |
| CCR5-1643 | + | GAAAAUAAACAAUCAUGAUG | 20 | 5322 |
| CCR5-2473 | + | AGAAAAUAAACAAUCAUGAUG | 21 | 5323 |
| CCR5-2474 | + | GAGAAAAUAAACAAUCAUGAUG | 22 | 5324 |
| CCR5-2475 | + | AGAGAAAAUAAACAAUCAUGAUG | 23 | 5325 |
| CCR5-2476 | + | AAGAGAAAAUAAACAAUCAUGAUG | 24 | 5326 |
| CCR5-2477 | + | UCGCUCGGGAGCCUCUUG | 18 | 5327 |
| CCR5-2478 | + | CUCGCUCGGGAGCCUCUUG | 19 | 5328 |
| CCR5-1617 | + | GCUCGCUCGGGAGCCUCUUG | 20 | 5329 |
| CCR5-2479 | + | UGCUCGCUCGGGAGCCUCUUG | 21 | 5330 |
| CCR5-2480 | + | UUGCUCGCUCGGGAGCCUCUUG | 22 | 5331 |
| CCR5-2481 | + | CUUGCUCGCUCGGGAGCCUCUUG | 23 | 5332 |
| CCR5-2482 | + | GCUUGCUCGCUCGGGAGCCUCUUG | 24 | 5333 |
| CCR5-2483 | + | AGGAGAAGGACAAUGUUG | 18 | 5334 |
| CCR5-2484 | + | CAGGAGAAGGACAAUGUUG | 19 | 5335 |
| CCR5-1637 | + | UCAGGAGAAGGACAAUGUUG | 20 | 5336 |
| CCR5-2485 | + | UUCAGGAGAAGGACAAUGUUG | 21 | 5337 |
| CCR5-2486 | + | GUUCAGGAGAAGGACAAUGUUG | 22 | 5338 |
| CCR5-2487 | + | UGUUCAGGAGAAGGACAAUGUUG | 23 | 5339 |
| CCR5-2488 | + | GUGUUCAGGAGAAGGACAAUGUUG | 24 | 5340 |
| CCR5-2489 | + | AAAAUAGAACAGCAUUUG | 18 | 5341 |
| CCR5-2490 | + | GAAAAUAGAACAGCAUUUG | 19 | 5342 |
| CCR5-1620 | + | GGAAAAUAGAACAGCAUUUG | 20 | 5343 |
| CCR5-2491 | + | UGGAAAAUAGAACAGCAUUUG | 21 | 5344 |
| CCR5-2492 | + | CUGGAAAAUAGAACAGCAUUUG | 22 | 5345 |
| CCR5-2493 | + | GCUGGAAAAUAGAACAGCAUUUG | 23 | 5346 |
| CCR5-2494 | + | UGCUGGAAAAUAGAACAGCAUUUG | 24 | 5347 |
| CCR5-2495 | + | ACUGACUGUAUGGAAAAU | 18 | 5348 |
| CCR5-2496 | + | UACUGACUGUAUGGAAAAU | 19 | 5349 |
| CCR5-1655 | + | AUACUGACUGUAUGGAAAAU | 20 | 5350 |
| CCR5-2497 | + | GAUACUGACUGUAUGGAAAAU | 21 | 5351 |
| CCR5-2498 | + | UGAUACUGACUGUAUGGAAAAU | 22 | 5352 |
| CCR5-2499 | + | UUGAUACUGACUGUAUGGAAAAU | 23 | 5353 |
| CCR5-2500 | + | AUUGAUACUGACUGUAUGGAAAAU | 24 | 5354 |
| CCR5-2501 | + | UGCUUUUGGAAGAAGACU | 18 | 5355 |
| CCR5-2502 | + | GUGCUUUUGGAAGAAGACU | 19 | 5356 |
| CCR5-1624 | + | UGUGCUUUUGGAAGAAGACU | 20 | 5357 |
| CCR5-2503 | + | AUGUGCUUUUGGAAGAAGACU | 21 | 5358 |
| CCR5-2504 | + | AAUGUGCUUUUGGAAGAAGACU | 22 | 5359 |
| CCR5-2505 | + | CAAUGUGCUUUUGGAAGAAGACU | 23 | 5360 |
| CCR5-2506 | + | GCAAUGUGCUUUUGGAAGAAGACU | 24 | 5361 |
| CCR5-2121 | + | CUGGUAAAGAUGAUUCCU | 18 | 5362 |
| CCR5-2122 | + | UCUGGUAAAGAUGAUUCCU | 19 | 5363 |
| CCR5-1877 | + | AUCUGGUAAAGAUGAUUCCU | 20 | 5364 |
| CCR5-2123 | + | GAUCUGGUAAAGAUGAUUCCU | 21 | 5365 |
| CCR5-2124 | + | AGAUCUGGUAAAGAUGAUUCCU | 22 | 5366 |
| CCR5-2125 | + | GAGAUCUGGUAAAGAUGAUUCCU | 23 | 5367 |
| CCR5-2126 | + | UGAGAUCUGGUAAAGAUGAUUCCU | 24 | 5368 |
| CCR5-2507 | + | AAACUGAGCUUGCUCGCU | 18 | 5369 |
| CCR5-2508 | + | UAAACUGAGCUUGCUCGCU | 19 | 5370 |
| CCR5-676 | + | GUAAACUGAGCUUGCUCGCU | 20 | 5371 |
| CCR5-2509 | + | UGUAAACUGAGCUUGCUCGCU | 21 | 5372 |
| CCR5-2510 | + | GUGUAAACUGAGCUUGCUCGCU | 22 | 5373 |
| CCR5-2511 | + | GGUGUAAACUGAGCUUGCUCGCU | 23 | 5374 |
| CCR5-2512 | + | GGGUGUAAACUGAGCUUGCUCGCU | 24 | 5375 |
| CCR5-2513 | + | GAUGACUAUCUUUAAUGU | 18 | 5376 |
| CCR5-2514 | + | AGAUGACUAUCUUUAAUGU | 19 | 5377 |
| CCR5-1649 | + | AAGAUGACUAUCUUUAAUGU | 20 | 5378 |
| CCR5-2515 | + | CAAGAUGACUAUCUUUAAUGU | 21 | 5379 |
| CCR5-2516 | + | CCAAGAUGACUAUCUUUAAUGU | 22 | 5380 |
| CCR5-2517 | + | CCCAAGAUGACUAUCUUUAAUGU | 23 | 5381 |
| CCR5-2518 | + | CCCCAAGAUGACUAUCUUUAAUGU | 24 | 5382 |
| CCR5-2519 | + | AGAAUUGAUACUGACUGU | 18 | 5383 |
| CCR5-2520 | + | CAGAAUUGAUACUGACUGU | 19 | 5384 |
| CCR5-1652 | + | CCAGAAUUGAUACUGACUGU | 20 | 5385 |
| CCR5-2521 | + | UCCAGAAUUGAUACUGACUGU | 21 | 5386 |
| CCR5-2522 | + | UUCCAGAAUUGAUACUGACUGU | 22 | 5387 |
| CCR5-2523 | + | CUUCCAGAAUUGAUACUGACUGU | 23 | 5388 |
| CCR5-2524 | + | UCUUCCAGAAUUGAUACUGACUGU | 24 | 5389 |
| CCR5-2525 | + | UAGCUUGGUCCAACCUGU | 18 | 5390 |
| CCR5-2526 | + | AUAGCUUGGUCCAACCUGU | 19 | 5391 |
| CCR5-1629 | + | CAUAGCUUGGUCCAACCUGU | 20 | 5392 |
| CCR5-2527 | + | GCAUAGCUUGGUCCAACCUGU | 21 | 5393 |
| CCR5-2528 | + | UGCAUAGCUUGGUCCAACCUGU | 22 | 5394 |
| CCR5-2529 | + | CUGCAUAGCUUGGUCCAACCUGU | 23 | 5395 |
| CCR5-2530 | + | CCUGCAUAGCUUGGUCCAACCUGU | 24 | 5396 |
| CCR5-2531 | + | GGAGAAGGACAAUGUUGU | 18 | 5397 |
| CCR5-2532 | + | AGGAGAAGGACAAUGUUGU | 19 | 5398 |
| CCR5-692 | + | CAGGAGAAGGACAAUGUUGU | 20 | 5399 |
| CCR5-2533 | + | UCAGGAGAAGGACAAUGUUGU | 21 | 5400 |
| CCR5-2534 | + | UUCAGGAGAAGGACAAUGUUGU | 22 | 5401 |
| CCR5-2535 | + | GUUCAGGAGAAGGACAAUGUUGU | 23 | 5402 |
| CCR5-2536 | + | UGUUCAGGAGAAGGACAAUGUUGU | 24 | 5403 |
| CCR5-2537 | + | GCGUUUGGCAAUGUGCUU | 18 | 5404 |
| CCR5-2538 | + | AGCGUUUGGCAAUGUGCUU | 19 | 5405 |
| CCR5-1621 | + | AAGCGUUUGGCAAUGUGCUU | 20 | 5406 |
| CCR5-2539 | + | GAAGCGUUUGGCAAUGUGCUU | 21 | 5407 |
| CCR5-2540 | + | AGAAGCGUUUGGCAAUGUGCUU | 22 | 5408 |
| CCR5-2541 | + | CAGAAGCGUUUGGCAAUGUGCUU | 23 | 5409 |
| CCR5-2542 | + | GCAGAAGCGUUUGGCAAUGUGCUU | 24 | 5410 |
| CCR5-2543 | + | GAAUUCCUGGAAGGUGUU | 18 | 5411 |
| CCR5-2544 | + | AGAAUUCCUGGAAGGUGUU | 19 | 5412 |
| CCR5-1633 | + | AAGAAUUCCUGGAAGGUGUU | 20 | 5413 |
| CCR5-2545 | + | AAAGAAUUCCUGGAAGGUGUU | 21 | 5414 |
| CCR5-2546 | + | CAAAGAAUUCCUGGAAGGUGUU | 22 | 5415 |
| CCR5-2547 | + | CCAAAGAAUUCCUGGAAGGUGUU | 23 | 5416 |
| CCR5-2548 | + | GCCAAAGAAUUCCUGGAAGGUGUU | 24 | 5417 |
| CCR5-2549 | + | CGUUUGGCAAUGUGCUUU | 18 | 5418 |
| CCR5-2550 | + | GCGUUUGGCAAUGUGCUUU | 19 | 5419 |
| CCR5-680 | + | AGCGUUUGGCAAUGUGCUUU | 20 | 5420 |
| CCR5-2551 | + | AAGCGUUUGGCAAUGUGCUUU | 21 | 5421 |
| CCR5-2552 | + | GAAGCGUUUGGCAAUGUGCUUU | 22 | 5422 |
| CCR5-2553 | + | AGAAGCGUUUGGCAAUGUGCUUU | 23 | 5423 |
| CCR5-2554 | + | CAGAAGCGUUUGGCAAUGUGCUUU | 24 | 5424 |
| CCR5-2145 | + | GUAAUGAAGACCUUCUUU | 18 | 5425 |
| CCR5-2146 | + | UGUAAUGAAGACCUUCUUU | 19 | 5426 |
| CCR5-1657 | + | GUGUAAUGAAGACCUUCUUU | 20 | 5427 |
| CCR5-2555 | + | GGUGUAAUGAAGACCUUCUUU | 21 | 5428 |
| CCR5-2556 | + | AGGUGUAAUGAAGACCUUCUUU | 22 | 5429 |
| CCR5-2557 | + | CAGGUGUAAUGAAGACCUUCUUU | 23 | 5430 |
| CCR5-2558 | + | GCAGGUGUAAUGAAGACCUUCUUU | 24 | 5431 |
| CCR5-2559 | + | AAGACUAAGAGGUAGUUU | 18 | 5432 |
| CCR5-2560 | + | GAAGACUAAGAGGUAGUUU | 19 | 5433 |
| CCR5-1625 | + | AGAAGACUAAGAGGUAGUUU | 20 | 5434 |
| CCR5-2561 | + | AAGAAGACUAAGAGGUAGUUU | 21 | 5435 |
| CCR5-2562 | + | GAAGAAGACUAAGAGGUAGUUU | 22 | 5436 |
| CCR5-2563 | + | GGAAGAAGACUAAGAGGUAGUUU | 23 | 5437 |
| CCR5-2564 | + | UGGAAGAAGACUAAGAGGUAGUUU | 24 | 5438 |
| CCR5-2147 | − | UCUUUACCAGAUCUCAAA | 18 | 5439 |
| CCR5-2148 | − | AUCUUUACCAGAUCUCAAA | 19 | 5440 |
| CCR5-2149 | − | CAUCUUUACCAGAUCUCAAA | 20 | 5441 |
| CCR5-2150 | − | UCAUCUUUACCAGAUCUCAAA | 21 | 5442 |
| CCR5-2151 | − | AUCAUCUUUACCAGAUCUCAAA | 22 | 5443 |
| CCR5-2152 | − | AAUCAUCUUUACCAGAUCUCAAA | 23 | 5444 |
| CCR5-2153 | − | GAAUCAUCUUUACCAGAUCUCAAA | 24 | 5445 |
| CCR5-2565 | − | CUUGUGACACGGACUCAA | 18 | 5446 |
| CCR5-2566 | − | GCUUGUGACACGGACUCAA | 19 | 5447 |
| CCR5-963 | − | GGCUUGUGACACGGACUCAA | 20 | 5448 |
| CCR5-2567 | − | GGGCUUGUGACACGGACUCAA | 21 | 5449 |
| CCR5-2568 | − | UGGGCUUGUGACACGGACUCAA | 22 | 5450 |
| CCR5-2569 | − | GUGGGCUUGUGACACGGACUCAA | 23 | 5451 |
| CCR5-2570 | − | UGUGGGCUUGUGACACGGACUCAA | 24 | 5452 |
| CCR5-2571 | − | CUCUGCUUCGGUGUCGAA | 18 | 5453 |
| CCR5-2572 | − | ACUCUGCUUCGGUGUCGAA | 19 | 5454 |
| CCR5-931 | − | AACUCUGCUUCGGUGUCGAA | 20 | 5455 |
| CCR5-2573 | − | AAACUCUGCUUCGGUGUCGAA | 21 | 5456 |
| CCR5-2574 | − | AAAACUCUGCUUCGGUGUCGAA | 22 | 5457 |
| CCR5-2575 | − | AAAAACUCUGCUUCGGUGUCGAA | 23 | 5458 |
| CCR5-2576 | − | UAAAAACUCUGCUUCGGUGUCGAA | 24 | 5459 |
| CCR5-2577 | − | CAGUUUACACCCGAUCCA | 18 | 5460 |
| CCR5-2578 | − | UCAGUUUACACCCGAUCCA | 19 | 5461 |
| CCR5-955 | − | CUCAGUUUACACCCGAUCCA | 20 | 5462 |
| CCR5-2579 | − | GCUCAGUUUACACCCGAUCCA | 21 | 5463 |
| CCR5-2580 | − | AGCUCAGUUUACACCCGAUCCA | 22 | 5464 |
| CCR5-2581 | − | AAGCUCAGUUUACACCCGAUCCA | 23 | 5465 |
| CCR5-2582 | − | CAAGCUCAGUUUACACCCGAUCCA | 24 | 5466 |
| CCR5-2583 | − | AAAUGAGAAGAAGAGGCA | 18 | 5467 |
| CCR5-2584 | − | GAAAUGAGAAGAAGAGGCA | 19 | 5468 |
| CCR5-935 | − | CGAAAUGAGAAGAAGAGGCA | 20 | 5469 |
| CCR5-2585 | − | UCGAAAUGAGAAGAAGAGGCA | 21 | 5470 |
| CCR5-2586 | − | GUCGAAAUGAGAAGAAGAGGCA | 22 | 5471 |
| CCR5-2587 | − | UGUCGAAAUGAGAAGAAGAGGCA | 23 | 5472 |
| CCR5-2588 | − | GUGUCGAAAUGAGAAGAAGAGGCA | 24 | 5473 |
| CCR5-2589 | − | CCAGCAAGAGGCUCCCGA | 18 | 5474 |
| CCR5-2590 | − | UCCAGCAAGAGGCUCCCGA | 19 | 5475 |
| CCR5-954 | − | UUCCAGCAAGAGGCUCCCGA | 20 | 5476 |
| CCR5-2591 | − | UUUCCAGCAAGAGGCUCCCGA | 21 | 5477 |
| CCR5-2592 | − | UUUUCCAGCAAGAGGCUCCCGA | 22 | 5478 |
| CCR5-2593 | − | AUUUUCCAGCAAGAGGCUCCCGA | 23 | 5479 |
| CCR5-2594 | − | UAUUUUCCAGCAAGAGGCUCCCGA | 24 | 5480 |
| CCR5-2595 | − | ACCAAGCUAUGCAGGUGA | 18 | 5481 |
| CCR5-2596 | − | GACCAAGCUAUGCAGGUGA | 19 | 5482 |
| CCR5-943 | − | GGACCAAGCUAUGCAGGUGA | 20 | 5483 |
| CCR5-2597 | − | UGGACCAAGCUAUGCAGGUGA | 21 | 5484 |
| CCR5-2598 | − | UUGGACCAAGCUAUGCAGGUGA | 22 | 5485 |
| CCR5-2599 | − | GUUGGACCAAGCUAUGCAGGUGA | 23 | 5486 |
| CCR5-2600 | − | GGUUGGACCAAGCUAUGCAGGUGA | 24 | 5487 |
| CCR5-2601 | − | AGUUUACACCCGAUCCAC | 18 | 5488 |
| CCR5-2602 | − | CAGUUUACACCCGAUCCAC | 19 | 5489 |
| CCR5-178 | − | UCAGUUUACACCCGAUCCAC | 20 | 5490 |
| CCR5-2603 | − | CUCAGUUUACACCCGAUCCAC | 21 | 5491 |
| CCR5-2604 | − | GCUCAGUUUACACCCGAUCCAC | 22 | 5492 |
| CCR5-2605 | − | AGCUCAGUUUACACCCGAUCCAC | 23 | 5493 |
| CCR5-2606 | − | AAGCUCAGUUUACACCCGAUCCAC | 24 | 5494 |
| CCR5-2607 | − | UAUCUGUGGGCUUGUGAC | 18 | 5495 |
| CCR5-2608 | − | AUAUCUGUGGGCUUGUGAC | 19 | 5496 |
| CCR5-962 | − | AAUAUCUGUGGGCUUGUGAC | 20 | 5497 |
| CCR5-2609 | − | AAAUAUCUGUGGGCUUGUGAC | 21 | 5498 |
| CCR5-2610 | − | GAAAUAUCUGUGGGCUUGUGAC | 22 | 5499 |
| CCR5-2611 | − | GGAAAUAUCUGUGGGCUUGUGAC | 23 | 5500 |
| CCR5-2612 | − | AGGAAAUAUCUGUGGGCUUGUGAC | 24 | 5501 |
| CCR5-2613 | − | GUCAUGGUCAUCUGCUAC | 18 | 5502 |
| CCR5-2614 | − | UGUCAUGGUCAUCUGCUAC | 19 | 5503 |
| CCR5-927 | − | UUGUCAUGGUCAUCUGCUAC | 20 | 5504 |
| CCR5-2615 | − | CUUGUCAUGGUCAUCUGCUAC | 21 | 5505 |
| CCR5-2616 | − | GCUUGUCAUGGUCAUCUGCUAC | 22 | 5506 |
| CCR5-2617 | − | UGCUUGUCAUGGUCAUCUGCUAC | 23 | 5507 |
| CCR5-2618 | − | CUGCUUGUCAUGGUCAUCUGCUAC | 24 | 5508 |
| CCR5-2619 | − | GCUGUUCUAUUUUCCAGC | 18 | 5509 |
| CCR5-2620 | − | UGCUGUUCUAUUUUCCAGC | 19 | 5510 |
| CCR5-952 | − | AUGCUGUUCUAUUUUCCAGC | 20 | 5511 |
| CCR5-2621 | − | AAUGCUGUUCUAUUUUCCAGC | 21 | 5512 |
| CCR5-2622 | − | AAAUGCUGUUCUAUUUUCCAGC | 22 | 5513 |
| CCR5-2623 | − | CAAAUGCUGUUCUAUUUUCCAGC | 23 | 5514 |
| CCR5-2624 | − | GCAAAUGCUGUUCUAUUUUCCAGC | 24 | 5515 |
| CCR5-2625 | − | CCCGAUCCACUGGGGAGC | 18 | 5516 |
| CCR5-2626 | − | ACCCGAUCCACUGGGGAGC | 19 | 5517 |
| CCR5-181 | − | CACCCGAUCCACUGGGGAGC | 20 | 5518 |
| CCR5-2627 | − | ACACCCGAUCCACUGGGGAGC | 21 | 5519 |
| CCR5-2628 | − | UACACCCGAUCCACUGGGGAGC | 22 | 5520 |
| CCR5-2629 | − | UUACACCCGAUCCACUGGGGAGC | 23 | 5521 |
| CCR5-2630 | − | UUUACACCCGAUCCACUGGGGAGC | 24 | 5522 |
| CCR5-2631 | − | ACAUUAAAGAUAGUCAUC | 18 | 5523 |
| CCR5-2632 | − | GACAUUAAAGAUAGUCAUC | 19 | 5524 |
| CCR5-925 | − | AGACAUUAAAGAUAGUCAUC | 20 | 5525 |
| CCR5-2633 | − | CAGACAUUAAAGAUAGUCAUC | 21 | 5526 |
| CCR5-2634 | − | CCAGACAUUAAAGAUAGUCAUC | 22 | 5527 |
| CCR5-2635 | − | UCCAGACAUUAAAGAUAGUCAUC | 23 | 5528 |
| CCR5-2636 | − | UUCCAGACAUUAAAGAUAGUCAUC | 24 | 5529 |
| CCR5-2637 | − | UGCAGGUGACAGAGACUC | 18 | 5530 |
| CCR5-2638 | − | AUGCAGGUGACAGAGACUC | 19 | 5531 |
| CCR5-944 | − | UAUGCAGGUGACAGAGACUC | 20 | 5532 |
| CCR5-2639 | − | CUAUGCAGGUGACAGAGACUC | 21 | 5533 |
| CCR5-2640 | − | GCUAUGCAGGUGACAGAGACUC | 22 | 5534 |
| CCR5-2641 | − | AGCUAUGCAGGUGACAGAGACUC | 23 | 5535 |
| CCR5-2642 | − | AAGCUAUGCAGGUGACAGAGACUC | 24 | 5536 |
| CCR5-2643 | − | UUUUCCAGCAAGAGGCUC | 18 | 5537 |
| CCR5-2644 | − | AUUUUCCAGCAAGAGGCUC | 19 | 5538 |
| CCR5-953 | − | UAUUUUCCAGCAAGAGGCUC | 20 | 5539 |
| CCR5-2645 | − | CUAUUUUCCAGCAAGAGGCUC | 21 | 5540 |
| CCR5-2646 | − | UCUAUUUUCCAGCAAGAGGCUC | 22 | 5541 |
| CCR5-2647 | − | UUCUAUUUUCCAGCAAGAGGCUC | 23 | 5542 |
| CCR5-2648 | − | GUUCUAUUUUCCAGCAAGAGGCUC | 24 | 5543 |
| CCR5-2649 | − | UACAACAUUGUCCUUCUC | 18 | 5544 |
| CCR5-2650 | − | CUACAACAUUGUCCUUCUC | 19 | 5545 |
| CCR5-938 | − | CCUACAACAUUGUCCUUCUC | 20 | 5546 |
| CCR5-2651 | − | CCCUACAACAUUGUCCUUCUC | 21 | 5547 |
| CCR5-2652 | − | UCCCUACAACAUUGUCCUUCUC | 22 | 5548 |
| CCR5-2653 | − | CUCCCUACAACAUUGUCCUUCUC | 23 | 5549 |
| CCR5-2654 | − | GCUCCCUACAACAUUGUCCUUCUC | 24 | 5550 |
| CCR5-2655 | − | AUCAUCUAUGCCUUUGUC | 18 | 5551 |
| CCR5-2656 | − | CAUCAUCUAUGCCUUUGUC | 19 | 5552 |
| CCR5-175 | − | CCAUCAUCUAUGCCUUUGUC | 20 | 5553 |
| CCR5-2657 | − | CCCAUCAUCUAUGCCUUUGUC | 21 | 5554 |
| CCR5-2658 | − | CCCCAUCAUCUAUGCCUUUGUC | 22 | 5555 |
| CCR5-2659 | − | ACCCCAUCAUCUAUGCCUUUGUC | 23 | 5556 |
| CCR5-2660 | − | AACCCCAUCAUCUAUGCCUUUGUC | 24 | 5557 |
| CCR5-2661 | − | UACAGUCAGUAUCAAUUC | 18 | 5558 |
| CCR5-2662 | − | AUACAGUCAGUAUCAAUUC | 19 | 5559 |
| CCR5-152 | − | CAUACAGUCAGUAUCAAUUC | 20 | 5560 |
| CCR5-2663 | − | CCAUACAGUCAGUAUCAAUUC | 21 | 5561 |
| CCR5-2664 | − | UCCAUACAGUCAGUAUCAAUUC | 22 | 5562 |
| CCR5-2665 | − | UUCCAUACAGUCAGUAUCAAUUC | 23 | 5563 |
| CCR5-2666 | − | UUUCCAUACAGUCAGUAUCAAUUC | 24 | 5564 |
| CCR5-2667 | − | CUUCUCCUGAACACCUUC | 18 | 5565 |
| CCR5-2668 | − | CCUUCUCCUGAACACCUUC | 19 | 5566 |
| CCR5-939 | − | UCCUUCUCCUGAACACCUUC | 20 | 5567 |
| CCR5-2669 | − | GUCCUUCUCCUGAACACCUUC | 21 | 5568 |
| CCR5-2670 | − | UGUCCUUCUCCUGAACACCUUC | 22 | 5569 |
| CCR5-2671 | − | UUGUCCUUCUCCUGAACACCUUC | 23 | 5570 |
| CCR5-2672 | − | AUUGUCCUUCUCCUGAACACCUUC | 24 | 5571 |
| CCR5-2673 | − | CGGUGUCGAAAUGAGAAG | 18 | 5572 |
| CCR5-2674 | − | UCGGUGUCGAAAUGAGAAG | 19 | 5573 |
| CCR5-934 | − | UUCGGUGUCGAAAUGAGAAG | 20 | 5574 |
| CCR5-2675 | − | CUUCGGUGUCGAAAUGAGAAG | 21 | 5575 |
| CCR5-2676 | − | GCUUCGGUGUCGAAAUGAGAAG | 22 | 5576 |
| CCR5-2677 | − | UGCUUCGGUGUCGAAAUGAGAAG | 23 | 5577 |
| CCR5-2678 | − | CUGCUUCGGUGUCGAAAUGAGAAG | 24 | 5578 |
| CCR5-2679 | − | ACCCGAUCCACUGGGGAG | 18 | 5579 |
| CCR5-2680 | − | CACCCGAUCCACUGGGGAG | 19 | 5580 |
| CCR5-959 | − | ACACCCGAUCCACUGGGGAG | 20 | 5581 |
| CCR5-2681 | − | UACACCCGAUCCACUGGGGAG | 21 | 5582 |
| CCR5-2682 | − | UUACACCCGAUCCACUGGGGAG | 22 | 5583 |
| CCR5-2683 | − | UUUACACCCGAUCCACUGGGGAG | 23 | 5584 |
| CCR5-2684 | − | GUUUACACCCGAUCCACUGGGGAG | 24 | 5585 |
| CCR5-2685 | − | CUUCGGUGUCGAAAUGAG | 18 | 5586 |
| CCR5-2686 | − | GCUUCGGUGUCGAAAUGAG | 19 | 5587 |
| CCR5-933 | − | UGCUUCGGUGUCGAAAUGAG | 20 | 5588 |
| CCR5-2687 | − | CUGCUUCGGUGUCGAAAUGAG | 21 | 5589 |
| CCR5-2688 | − | UCUGCUUCGGUGUCGAAAUGAG | 22 | 5590 |
| CCR5-2689 | − | CUCUGCUUCGGUGUCGAAAUGAG | 23 | 5591 |
| CCR5-2690 | − | ACUCUGCUUCGGUGUCGAAAUGAG | 24 | 5592 |
| CCR5-2691 | − | UCAUCUAUGCCUUUGUCG | 18 | 5593 |
| CCR5-2692 | − | AUCAUCUAUGCCUUUGUCG | 19 | 5594 |
| CCR5-176 | − | CAUCAUCUAUGCCUUUGUCG | 20 | 5595 |
| CCR5-2693 | − | CCAUCAUCUAUGCCUUUGUCG | 21 | 5596 |
| CCR5-2694 | − | CCCAUCAUCUAUGCCUUUGUCG | 22 | 5597 |
| CCR5-2695 | − | CCCCAUCAUCUAUGCCUUUGUCG | 23 | 5598 |
| CCR5-2696 | − | ACCCCAUCAUCUAUGCCUUUGUCG | 24 | 5599 |
| CCR5-2697 | − | UGCAGUAGCUCUAACAGG | 18 | 5600 |
| CCR5-2698 | − | UUGCAGUAGCUCUAACAGG | 19 | 5601 |
| CCR5-942 | − | AUUGCAGUAGCUCUAACAGG | 20 | 5602 |
| CCR5-2699 | − | AAUUGCAGUAGCUCUAACAGG | 21 | 5603 |
| CCR5-2700 | − | UAAUUGCAGUAGCUCUAACAGG | 22 | 5604 |
| CCR5-2701 | − | AUAAUUGCAGUAGCUCUAACAGG | 23 | 5605 |
| CCR5-2702 | − | AAUAAUUGCAGUAGCUCUAACAGG | 24 | 5606 |
| CCR5-2703 | − | AUCUAUGCCUUUGUCGGG | 18 | 5607 |
| CCR5-2704 | − | CAUCUAUGCCUUUGUCGGG | 19 | 5608 |
| CCR5-950 | − | UCAUCUAUGCCUUUGUCGGG | 20 | 5609 |
| CCR5-2705 | − | AUCAUCUAUGCCUUUGUCGGG | 21 | 5610 |
| CCR5-2706 | − | CAUCAUCUAUGCCUUUGUCGGG | 22 | 5611 |
| CCR5-2707 | − | CCAUCAUCUAUGCCUUUGUCGGG | 23 | 5612 |
| CCR5-2708 | − | CCCAUCAUCUAUGCCUUUGUCGGG | 24 | 5613 |
| CCR5-2709 | − | UUUACACCCGAUCCACUG | 18 | 5614 |
| CCR5-2710 | − | GUUUACACCCGAUCCACUG | 19 | 5615 |
| CCR5-180 | − | AGUUUACACCCGAUCCACUG | 20 | 5616 |
| CCR5-2711 | − | CAGUUUACACCCGAUCCACUG | 21 | 5617 |
| CCR5-2712 | − | UCAGUUUACACCCGAUCCACUG | 22 | 5618 |
| CCR5-2713 | − | CUCAGUUUACACCCGAUCCACUG | 23 | 5619 |
| CCR5-2714 | − | GCUCAGUUUACACCCGAUCCACUG | 24 | 5620 |
| CCR5-2715 | − | AAAAACUCUGCUUCGGUG | 18 | 5621 |
| CCR5-2716 | − | UAAAAACUCUGCUUCGGUG | 19 | 5622 |
| CCR5-930 | − | CUAAAAACUCUGCUUCGGUG | 20 | 5623 |
| CCR5-2717 | − | CCUAAAAACUCUGCUUCGGUG | 21 | 5624 |
| CCR5-2718 | − | UCCUAAAAACUCUGCUUCGGUG | 22 | 5625 |
| CCR5-2719 | − | AUCCUAAAAACUCUGCUUCGGUG | 23 | 5626 |
| CCR5-2720 | − | AAUCCUAAAAACUCUGCUUCGGUG | 24 | 5627 |
| CCR5-2721 | − | CCAUCAUCUAUGCCUUUG | 18 | 5628 |
| CCR5-2722 | − | CCCAUCAUCUAUGCCUUUG | 19 | 5629 |
| CCR5-946 | − | CCCCAUCAUCUAUGCCUUUG | 20 | 5630 |
| CCR5-2723 | − | ACCCCAUCAUCUAUGCCUUUG | 21 | 5631 |
| CCR5-2724 | − | AACCCCAUCAUCUAUGCCUUUG | 22 | 5632 |
| CCR5-2725 | − | CAACCCCAUCAUCUAUGCCUUUG | 23 | 5633 |
| CCR5-2726 | − | UCAACCCCAUCAUCUAUGCCUUUG | 24 | 5634 |
| CCR5-2727 | − | CUGCUUCGGUGUCGAAAU | 18 | 5635 |
| CCR5-2728 | − | UCUGCUUCGGUGUCGAAAU | 19 | 5636 |
| CCR5-932 | − | CUCUGCUUCGGUGUCGAAAU | 20 | 5637 |
| CCR5-2729 | − | ACUCUGCUUCGGUGUCGAAAU | 21 | 5638 |
| CCR5-2730 | − | AACUCUGCUUCGGUGUCGAAAU | 22 | 5639 |
| CCR5-2731 | − | AAACUCUGCUUCGGUGUCGAAAU | 23 | 5640 |
| CCR5-2732 | − | AAAACUCUGCUUCGGUGUCGAAAU | 24 | 5641 |
| CCR5-2733 | − | GUUUACACCCGAUCCACU | 18 | 5642 |
| CCR5-2734 | − | AGUUUACACCCGAUCCACU | 19 | 5643 |
| CCR5-179 | − | CAGUUUACACCCGAUCCACU | 20 | 5644 |
| CCR5-2735 | − | UCAGUUUACACCCGAUCCACU | 21 | 5645 |
| CCR5-2736 | − | CUCAGUUUACACCCGAUCCACU | 22 | 5646 |
| CCR5-2737 | − | GCUCAGUUUACACCCGAUCCACU | 23 | 5647 |
| CCR5-2738 | − | AGCUCAGUUUACACCCGAUCCACU | 24 | 5648 |
| CCR5-2739 | − | UCAUGGUCAUCUGCUACU | 18 | 5649 |
| CCR5-2740 | − | GUCAUGGUCAUCUGCUACU | 19 | 5650 |
| CCR5-158 | − | UGUCAUGGUCAUCUGCUACU | 20 | 5651 |
| CCR5-2741 | − | UUGUCAUGGUCAUCUGCUACU | 21 | 5652 |
| CCR5-2742 | − | CUUGUCAUGGUCAUCUGCUACU | 22 | 5653 |
| CCR5-2743 | − | GCUUGUCAUGGUCAUCUGCUACU | 23 | 5654 |
| CCR5-2744 | − | UGCUUGUCAUGGUCAUCUGCUACU | 24 | 5655 |
| CCR5-2745 | − | AAGAAGAGGCACAGGGCU | 18 | 5656 |
| CCR5-2746 | − | GAAGAAGAGGCACAGGGCU | 19 | 5657 |
| CCR5-936 | − | AGAAGAAGAGGCACAGGGCU | 20 | 5658 |
| CCR5-2747 | − | GAGAAGAAGAGGCACAGGGCU | 21 | 5659 |
| CCR5-2748 | − | UGAGAAGAAGAGGCACAGGGCU | 22 | 5660 |
| CCR5-2749 | − | AUGAGAAGAAGAGGCACAGGGCU | 23 | 5661 |
| CCR5-2750 | − | AAUGAGAAGAAGAGGCACAGGGCU | 24 | 5662 |
| CCR5-2751 | − | CAUUAAAGAUAGUCAUCU | 18 | 5663 |
| CCR5-2752 | − | ACAUUAAAGAUAGUCAUCU | 19 | 5664 |
| CCR5-153 | − | GACAUUAAAGAUAGUCAUCU | 20 | 5665 |
| CCR5-2753 | − | AGACAUUAAAGAUAGUCAUCU | 21 | 5666 |
| CCR5-2754 | − | CAGACAUUAAAGAUAGUCAUCU | 22 | 5667 |
| CCR5-2755 | − | CCAGACAUUAAAGAUAGUCAUCU | 23 | 5668 |
| CCR5-2756 | − | UCCAGACAUUAAAGAUAGUCAUCU | 24 | 5669 |
| CCR5-2757 | − | GGGGAGCAGGAAAUAUCU | 18 | 5670 |
| CCR5-2758 | − | UGGGGAGCAGGAAAUAUCU | 19 | 5671 |
| CCR5-961 | − | CUGGGGAGCAGGAAAUAUCU | 20 | 5672 |
| CCR5-2759 | − | ACUGGGGAGCAGGAAAUAUCU | 21 | 5673 |
| CCR5-2760 | − | CACUGGGGAGCAGGAAAUAUCU | 22 | 5674 |
| CCR5-2761 | − | CCACUGGGGAGCAGGAAAUAUCU | 23 | 5675 |
| CCR5-2762 | − | UCCACUGGGGAGCAGGAAAUAUCU | 24 | 5676 |
| CCR5-2763 | − | CAUCAUCUAUGCCUUUGU | 18 | 5677 |
| CCR5-2764 | − | CCAUCAUCUAUGCCUUUGU | 19 | 5678 |
| CCR5-174 | − | CCCAUCAUCUAUGCCUUUGU | 20 | 5679 |
| CCR5-2765 | − | CCCCAUCAUCUAUGCCUUUGU | 21 | 5680 |
| CCR5-2766 | − | ACCCCAUCAUCUAUGCCUUUGU | 22 | 5681 |
| CCR5-2767 | − | AACCCCAUCAUCUAUGCCUUUGU | 23 | 5682 |
| CCR5-2768 | − | CAACCCCAUCAUCUAUGCCUUUGU | 24 | 5683 |
| CCR5-2769 | − | AUACAGUCAGUAUCAAUU | 18 | 5684 |
| CCR5-2770 | − | CAUACAGUCAGUAUCAAUU | 19 | 5685 |
| CCR5-922 | − | CCAUACAGUCAGUAUCAAUU | 20 | 5686 |
| CCR5-2771 | − | UCCAUACAGUCAGUAUCAAUU | 21 | 5687 |
| CCR5-2772 | − | UUCCAUACAGUCAGUAUCAAUU | 22 | 5688 |
| CCR5-2773 | − | UUUCCAUACAGUCAGUAUCAAUU | 23 | 5689 |
| CCR5-2774 | − | UUUUCCAUACAGUCAGUAUCAAUU | 24 | 5690 |
| CCR5-2775 | − | GAUUGUUUAUUUUCUCUU | 18 | 5691 |
| CCR5-2776 | − | UGAUUGUUUAUUUUCUCUU | 19 | 5692 |
| CCR5-937 | − | AUGAUUGUUUAUUUUCUCUU | 20 | 5693 |
| CCR5-2777 | − | CAUGAUUGUUUAUUUUCUCUU | 21 | 5694 |
| CCR5-2778 | − | UCAUGAUUGUUUAUUUUCUCUU | 22 | 5695 |
| CCR5-2779 | − | AUCAUGAUUGUUUAUUUUCUCUU | 23 | 5696 |
| CCR5-2780 | − | CAUCAUGAUUGUUUAUUUUCUCUU | 24 | 5697 |
| CCR5-2781 | − | CUUUGUCGGGGAGAAGUU | 18 | 5698 |
| CCR5-2782 | − | CCUUUGUCGGGGAGAAGUU | 19 | 5699 |
| CCR5-951 | − | GCCUUUGUCGGGGAGAAGUU | 20 | 5700 |
| CCR5-2783 | − | UGCCUUUGUCGGGGAGAAGUU | 21 | 5701 |
| CCR5-2784 | − | AUGCCUUUGUCGGGGAGAAGUU | 22 | 5702 |
| CCR5-2785 | − | UAUGCCUUUGUCGGGGAGAAGUU | 23 | 5703 |
| CCR5-2786 | − | CUAUGCCUUUGUCGGGGAGAAGUU | 24 | 5704 |

[0659] Table 4A provides exemplary targeting domains for knocking out the CCR5 gene selected according to the first tier parameters. The targeting domains bind within the first 500 bp of the coding sequence (e.g., with 500 bp downstream from the start codon) and have a high level of orthogonality. It is contemplated herein that in an embodiment the targeting domain hybridizes to the target domain through complementary base pairing. Any of the targeting domains in the table can be used with a N. meningitidis Cas9 molecule that generates a double stranded break (Cas9 nuclease) or a single-stranded break (Cas9 nickase).

TABLE 4A
1st Tier

| | | | Target | |
|---|---|---|---|---|
| gRNA | DNA | | Site | SEQ ID |
| Name | Strand | Targeting Domain | Length | NO |
| CCR5-2787 | − | UGCACAGGGUGGAACAA | 17 | 5705 |
| CCR5-1824 | + | GGCUGCGAUUUGCUUCA | 17 | 5706 |
| CCR5-1821 | + | GACGACAGCCAGGUACC | 17 | 5707 |
| CCR5-1823 | + | CGGAGGCAGGAGGCGGG | 17 | 5708 |
| CCR5-1825 | + | UGUAUAAUAAUUGAUGU | 17 | 5709 |
| CCR5-2788 | − | GCUGUCGUCCAUGCUGU | 17 | 5710 |
| CCR5-2789 | − | UGACAGGGCUCUAUUUU | 17 | 5711 |
| CCR5-2790 | − | UUAUGCACAGGGUGGAACAA | 20 | 5712 |
| CCR5-1819 | + | GCGGGCUGCGAUUUGCUUCA | 20 | 5713 |
| CCR5-1816 | + | AUGGACGACAGCCAGGUACC | 20 | 5714 |
| CCR5-1818 | + | GAGCGGAGGCAGGAGGCGGG | 20 | 5715 |
| CCR5-1820 | + | CGAUGUAUAAUAAUUGAUGU | 20 | 5716 |
| CCR5-2791 | − | UCUUGACAGGGCUCUAUUUU | 20 | 5717 |

[0660] Table 4B provides exemplary targeting domains for knocking out the CCR5 gene selected according to the second tier parameters. The targeting domains bind within the first 500 bp of the coding sequence (e.g., with 500 bp downstream from the start codon). It is contemplated herein that in an embodiment the targeting domain hybridizes to the target domain through complementary base pairing. Any of the targeting domains in the table can be used with a N. meningitidis Cas9 molecule that generates a double stranded break (Cas9 nuclease) or a single-stranded break (Cas9 nickase).

TABLE 4B
2nd Tier

| | | | Target | |
|---|---|---|---|---|
| gRNA | DNA | | Site | SEQ ID |
| Name | Strand | Targeting Domain | Length | NO |
| CCR5-2792 | + | UUUUUGAGAUCUGGUAA | 17 | 5718 |
| CCR5-1822 | + | UGUCAGGAGGAUGAUGA | 17 | 5719 |
| CCR5-2793 | + | GCAGGAGGCGGGCUGCG | 17 | 5720 |
| CCR5-2794 | + | ACCCCAAAGGUGACCGU | 17 | 5721 |
| CCR5-2795 | + | UUCUUUUUGAGAUCUGGUAA | 20 | 5722 |
| CCR5-1817 | + | GAUUGUCAGGAGGAUGAUGA | 20 | 5723 |
| CCR5-2796 | + | GAGGCAGGAGGCGGGCUGCG | 20 | 5724 |
| CCR5-2797 | + | ACCACCCCAAAGGUGACCGU | 20 | 5725 |
| CCR5-2798 | − | CUGGCUGUCGUCCAUGCUGU | 20 | 5726 |

[0661] Table 4C provides exemplary targeting domains for knocking out the CCR5 gene selected according to the third tier parameters. The targeting domains fall in the coding sequence of the gene, downstream of the first 500 bp of coding sequence (e.g., anywhere from +500 (relative to the start codon) to the stop codon of the gene. It is contemplated herein that in an embodiment the targeting domain hybridizes to the target domain through complementary base pairing. Any of the targeting domains in the table can be used with a N. meningitidis Cas9 molecule that generates a double stranded break (Cas9 nuclease) or a single-stranded break (Cas9 nickase).

TABLE 4C
3rd Tier

| | | | Target | |
|---|---|---|---|---|
| gRNA | DNA | | Site | SEQ ID |
| Name | Strand | Targeting Domain | Length | NO |
| CCR5-2799 | − | CUCGGGAAUCCUAAAAA | 17 | 5727 |
| CCR5-1771 | + | AGUGGAUCGGGUGUAAA | 17 | 5728 |
| CCR5-2792 | + | UUUUUGAGAUCUGGUAA | 17 | 5729 |
| CCR5-1841 | − | GAGGCUUAUCUUCACCA | 17 | 5730 |
| CCR5-2800 | + | UGCAGAAGCGUUUGGCA | 17 | 5731 |
| CCR5-2801 | − | UCCAAAAGCACAUUGCC | 17 | 5732 |
| CCR5-2802 | − | CUUGGGGCUGGUCCUGC | 17 | 5733 |
| CCR5-2803 | + | AGAGUCUCUGUCACCUG | 17 | 5734 |
| CCR5-2804 | − | GAAGAGGCACAGGGCUG | 17 | 5735 |
| CCR5-1250 | − | GGGAGCAGGAAAUAUCU | 17 | 5736 |
| CCR5-1863 | + | ACACCGAAGCAGAGUUU | 17 | 5737 |
| CCR5-2805 | − | CUACUCGGGAAUCCUAAAAA | 20 | 5738 |
| CCR5-1613 | + | CCCAGUGGAUCGGGUGUAAA | 20 | 5739 |
| CCR5-2795 | + | UUCUUUUUGAGAUCUGGUAA | 20 | 5740 |
| CCR5-1826 | − | UGUGAGGCUUAUCUUCACCA | 20 | 5741 |
| CCR5-2806 | + | AUUUGCAGAAGCGUUUGGCA | 20 | 5742 |
| CCR5-2807 | − | UCUUCCAAAAGCACAUUGCC | 20 | 5743 |
| CCR5-2808 | − | CAUCUUGGGGCUGGUCCUGC | 20 | 5744 |
| CCR5-2809 | + | CCAAGAGUCUCUGUCACCUG | 20 | 5745 |
| CCR5-2810 | − | GAAGAAGAGGCACAGGGCUG | 20 | 5746 |
| CCR5-961 | − | CUGGGGAGCAGGAAAUAUCU | 20 | 5747 |
| CCR5-1859 | + | UCGACACCGAAGCAGAGUUU | 20 | 5748 |

[0662] Table 5A provides exemplary targeting domains for knocking down the CCR5 gene selected according to the first tier parameters. The targeting domains bind within 500 bp (e.g., upstream or downstream) of a transcription start site (TSS) and have a high level of orthogonality. It is contemplated herein that in an embodiment the targeting domain hybridizes to the target domain through complementary base pairing. Any of the targeting domains in the table can be used with a S. pyogenes eiCas9 molecule or eiCas9 fusion protein (e.g., an eiCas9 fused to a transcription repressor domain) to alter the CCR5 gene (e.g., reduce or eliminate CCR5 gene expression, CCR5 protein function, or the level of CCR5 protein). One or more gRNAs may be used to target an eiCas9 to the promoter region of the CCR5 gene.

TABLE 5A
1st Tier

| | | | Target | |
|---|---|---|---|---|
| gRNA | DNA | | Site | SEQ ID |
| Name | Strand | Targeting Domain | Length | NO |
| CCR5-2811 | + | CUCAGAAGCUAACUAAC | 17 | 2217 |
| CCR5-2812 | + | UUACGGGCUUUUCUCAC | 17 | 2218 |
| CCR5-2813 | + | UGAGAGGUUACUUACCG | 17 | 2219 |
| CCR5-2814 | + | AGAAUAGAUCUCUGGUCUGA | 20 | 2220 |
| CCR5-2815 | + | CUGGUCUGAAGGUUUAUUUA | 20 | 2221 |
| CCR5-2816 | + | CAUCUCAGAAGCUAACUAAC | 20 | 2222 |
| CCR5-2817 | + | UGGUCUGAAGGUUUAUUUAC | 20 | 2223 |
| CCR5-2818 | − | CCCCUACAAGAAACUCUCCC | 20 | 2224 |
| CCR5-2819 | − | GAUAGGGGAUACGGGGAGAG | 20 | 2225 |
| CCR5-2820 | + | CCGGGGAGAGUUUCUUGUAG | 20 | 2226 |
| CCR5-2821 | + | AGCUGAGAGGUUACUUACCG | 20 | 2227 |
| CCR5-2822 | + | AAGAUAAUUGUAUGAGCACU | 20 | 2228 |
| CCR5-2823 | − | UCCCCCUCUACAUUUAAAGU | 20 | 2229 |

[0663] Table 5B provides exemplary targeting domains for knocking down the CCR5 gene selected according to the second tier parameters. The targeting domains bind within 500 bp (e.g., upstream or downstream) of a transcription start site (TSS). It is contemplated herein that in an embodiment the targeting domain hybridizes to the target domain through complementary base pairing. Any of the targeting domains in the table can be used with a S. pyogenes eiCas9 molecule or eiCas9 fusion protein (e.g., an eiCas9 fused to a transcription repressor domain) to alter the CCR5 gene (e.g., reduce or eliminate CCR5 gene expression, CCR5 protein function, or the level of CCR5 protein). One or more gRNA may be used to target an eiCas9 to the promoter region of the CCR5 gene.

TABLE 5B
2nd Tier

| | | | Target | |
|---|---|---|---|---|
| gRNA | DNA | | Site | SEQ ID |
| Name | Strand | Targeting Domain | Length | NO |
| CCR5-2824 | − | GGGAGAGUGGAGAAAAA | 17 | 2230 |
| CCR5-2825 | − | GGGGAGAGUGGAGAAAA | 17 | 2231 |
| CCR5-2826 | − | UCUUUAAGAUAAGGAAA | 17 | 2232 |
| CCR5-2827 | + | UCAACAGUAAGGCUAAA | 17 | 2233 |
| CCR5-2828 | − | GAGUGAAAGACUUUAAA | 17 | 2234 |
| CCR5-2829 | − | AUCUUUAAGAUAAGGAA | 17 | 2235 |
| CCR5-2830 | + | AGUUUCUUGUAGGGGAA | 17 | 2236 |
| CCR5-2831 | + | GAAAAUAUAAAGAAUAA | 17 | 2237 |
| CCR5-2832 | − | UGAGUGAAAGACUUUAA | 17 | 2238 |
| CCR5-2833 | − | GAGAAAAAGGGGACACA | 17 | 2239 |
| CCR5-2834 | + | AUUUGUACAAGAUCACA | 17 | 2240 |
| CCR5-2835 | − | UUGGAAUGAGUUUCAGA | 17 | 2241 |
| CCR5-2836 | + | AGGCAUCUCACUGGAGA | 17 | 2242 |
| CCR5-2837 | + | CCAACUUUAAAUGUAGA | 17 | 2243 |
| CCR5-2838 | + | CUGUUUCUUUUGAAGGA | 17 | 2244 |
| CCR5-2839 | + | AUAGAUCUCUGGUCUGA | 17 | 2245 |
| CCR5-2840 | + | AUCAUUAAGUGUAUUGA | 17 | 2246 |
| CCR5-2841 | + | AAUGCUGUUUCUUUUGA | 17 | 2247 |
| CCR5-2842 | − | AUAUAAUCUUUAAGAUA | 17 | 2248 |
| CCR5-2843 | − | GGGUGGGAUAGGGGAUA | 17 | 2249 |
| CCR5-2844 | − | GGGGUUGGGGUGGGAUA | 17 | 2250 |
| CCR5-2845 | − | AAUCUUAUCUUCUGCUA | 17 | 2251 |
| CCR5-2846 | + | UUGCCAAAUGUCUUCUA | 17 | 2252 |
| CCR5-2847 | + | AGGGCUUUUCAACAGUA | 17 | 2253 |
| CCR5-2848 | + | CUUUCUUUUGAGAGGUA | 17 | 2254 |
| CCR5-2849 | + | GGGGAGAGUUUCUUGUA | 17 | 2255 |
| CCR5-2850 | + | GUCUGAAGGUUUAUUUA | 17 | 2256 |
| CCR5-2851 | − | GGAGAAAAAGGGGACAC | 17 | 2257 |
| CCR5-2852 | + | GAUUUGUACAAGAUCAC | 17 | 2258 |
| CCR5-2853 | + | UUCAGAAGGCAUCUCAC | 17 | 2259 |
| CCR5-2854 | − | GGUGGGAUAGGGGAUAC | 17 | 2260 |
| CCR5-2855 | + | GCUGAGAGGUUACUUAC | 17 | 2261 |
| CCR5-2856 | + | UCUGAAGGUUUAUUUAC | 17 | 2262 |
| CCR5-2857 | − | UGAGUAAAAGACUUUAC | 17 | 2263 |
| CCR5-2858 | + | CUGAGAGGUUACUUACC | 17 | 2264 |
| CCR5-2859 | − | CUACAAGAAACUCUCCC | 17 | 2265 |
| CCR5-2860 | + | AAUGUAGAGGGGGAUCC | 17 | 2266 |
| CCR5-2861 | − | GGGUUAAUGUGAAGUCC | 17 | 2267 |
| CCR5-2862 | − | GAUUUGCACAGCUCAUC | 17 | 2268 |
| CCR5-2863 | + | GCUAGAGAAUAGAUCUC | 17 | 2269 |
| CCR5-2864 | + | GGAUGUCUCAGCUCUUC | 17 | 2270 |
| CCR5-2865 | − | GGAGAGUGGAGAAAAAG | 17 | 2271 |
| CCR5-2866 | − | AGGGGAUACGGGGAGAG | 17 | 2272 |
| CCR5-2867 | + | CAACUUUAAAUGUAGAG | 17 | 2273 |
| CCR5-2868 | + | AAGGCAUCUCACUGGAG | 17 | 2274 |
| CCR5-2869 | + | CAGGCCAAGCAGCUGAG | 17 | 2275 |
| CCR5-2870 | + | CAAAUCUUUCUUUUGAG | 17 | 2276 |
| CCR5-2871 | − | GGGUUGGGGUGGGAUAG | 17 | 2277 |
| CCR5-2872 | + | ACCAACUUUAAAUGUAG | 17 | 2278 |
| CCR5-2873 | − | UAACAGAUUCUGUGUAG | 17 | 2279 |
| CCR5-2874 | + | GGGAGAGUUUCUUGUAG | 17 | 2280 |
| CCR5-2875 | − | GUGGGAUAGGGGAUACG | 17 | 2281 |
| CCR5-2876 | + | GCUGUUUCUUUUGAAGG | 17 | 2282 |
| CCR5-2877 | + | AACUUUAAAUGUAGAGG | 17 | 2283 |
| CCR5-2878 | + | UUUCUUUUGAAGGAGGG | 17 | 2284 |
| CCR5-2879 | − | CUGUGUGGGGGUUGGGG | 17 | 2285 |
| CCR5-2880 | − | AGAACAAUAAUAUUGGG | 17 | 2286 |
| CCR5-2881 | − | GGUGAGCAUCUGUGUGG | 17 | 2287 |
| CCR5-2882 | − | UUUCUUUUACUAAAAUG | 17 | 2288 |
| CCR5-2883 | − | GGUGGUGAGCAUCUGUG | 17 | 2289 |
| CCR5-2884 | − | UGGUGAGCAUCUGUGUG | 17 | 2290 |
| CCR5-2885 | − | CAUCUGUGUGGGGGUUG | 17 | 2291 |
| CCR5-2886 | − | GGGGGUUGGGGUGGGAU | 17 | 2292 |
| CCR5-2887 | − | ACAGAGAACAAUAAUAU | 17 | 2293 |
| CCR5-2888 | + | UGCCAAAUGUCUUCUAU | 17 | 2294 |
| CCR5-2889 | + | AUAAUUGUAUGAGCACU | 17 | 2295 |
| CCR5-2890 | − | GUAACCUCUCAGCUGCU | 17 | 2296 |
| CCR5-2891 | − | ACAAAUCAUUUGCUUCU | 17 | 2297 |
| CCR5-2892 | + | AUAGACAGUAUAAAAGU | 17 | 2298 |
| CCR5-2893 | − | CCCUCUACAUUUAAAGU | 17 | 2299 |
| CCR5-2894 | − | UUAAAGUUGGUUUAAGU | 17 | 2300 |
| CCR5-2895 | − | AACAGAUUCUGUGUAGU | 17 | 2301 |
| CCR5-2896 | − | AGCAUCUGUGUGGGGGU | 17 | 2302 |
| CCR5-2897 | − | UGUGUGGGGGUUGGGGU | 17 | 2303 |
| CCR5-2898 | − | UUCUUUUACUAAAAUGU | 17 | 2304 |
| CCR5-2899 | − | GUGGUGAGCAUCUGUGU | 17 | 2305 |
| CCR5-2900 | + | CGGGGAGAGUUUCUUGU | 17 | 2306 |
| CCR5-2901 | − | AACCCAUAGAAGACAUU | 17 | 2307 |
| CCR5-2902 | − | CAGAGAACAAUAAUAUU | 17 | 2308 |
| CCR5-2903 | − | AGGAAAGGGUCACAGUU | 17 | 2309 |
| CCR5-2904 | − | GCAUCUGUGUGGGGGUU | 17 | 2310 |
| CCR5-2905 | − | ACGGGGAGAGUGGAGAAAAA | 20 | 2311 |
| CCR5-2906 | − | UACGGGGAGAGUGGAGAAAA | 20 | 2312 |
| CCR5-2907 | − | UAAUCUUUAAGAUAAGGAAA | 20 | 2313 |
| CCR5-2908 | + | UUUUCAACAGUAAGGCUAAA | 20 | 2314 |
| CCR5-2909 | − | UGUGAGUGAAAGACUUUAAA | 20 | 2315 |
| CCR5-2910 | − | AUAAUCUUUAAGAUAAGGAA | 20 | 2316 |
| CCR5-2911 | + | GAGAGUUUCUUGUAGGGGAA | 20 | 2317 |
| CCR5-2912 | + | UUAGAAAAUAUAAAGAAUAA | 20 | 2318 |
| CCR5-2913 | − | UUGUGAGUGAAAGACUUUAA | 20 | 2319 |
| CCR5-2914 | − | GUGGAGAAAAAGGGGACACA | 20 | 2320 |
| CCR5-2915 | + | AUGAUUUGUACAAGAUCACA | 20 | 2321 |
| CCR5-2916 | − | AGUUUGGAAUGAGUUUCAGA | 20 | 2322 |
| CCR5-2917 | + | AGAAGGCAUCUCACUGGAGA | 20 | 2323 |
| CCR5-2918 | + | AAACCAACUUUAAAUGUAGA | 20 | 2324 |
| CCR5-2919 | + | AUGCUGUUUCUUUUGAAGGA | 20 | 2325 |
| CCR5-2920 | + | UAAAUCAUUAAGUGUAUUGA | 20 | 2326 |
| CCR5-2921 | + | GGAAAUGCUGUUUCUUUUGA | 20 | 2327 |
| CCR5-2922 | − | AAAAUAUAAUCUUUAAGAUA | 20 | 2328 |
| CCR5-2923 | − | UUGGGGUGGGAUAGGGGAUA | 20 | 2329 |
| CCR5-2924 | − | GUGGGGGUUGGGGUGGGAUA | 20 | 2330 |
| CCR5-2925 | − | UGAAAUCUUAUCUUCUGCUA | 20 | 2331 |
| CCR5-2926 | + | UGUUUGCCAAAUGUCUUCUA | 20 | 2332 |
| CCR5-2927 | + | CACAGGGCUUUUCAACAGUA | 20 | 2333 |
| CCR5-2928 | + | AAUCUUUCUUUUGAGAGGUA | 20 | 2334 |
| CCR5-2929 | + | ACCGGGGAGAGUUUCUUGUA | 20 | 2335 |
| CCR5-2930 | − | AGUGGAGAAAAAGGGGACAC | 20 | 2336 |
| CCR5-2931 | + | AAUGAUUUGUACAAGAUCAC | 20 | 2337 |
| CCR5-2932 | + | AUAUUCAGAAGGCAUCUCAC | 20 | 2338 |
| CCR5-2933 | + | UAUUUACGGGCUUUUCUCAC | 20 | 2339 |
| CCR5-2934 | − | UGGGGUGGGAUAGGGGAUAC | 20 | 2340 |
| CCR5-2935 | + | GCAGCUGAGAGGUUACUUAC | 20 | 2341 |
| CCR5-2936 | − | AGAUGAGUAAAAGACUUUAC | 20 | 2342 |
| CCR5-2937 | + | CAGCUGAGAGGUUACUUACC | 20 | 2343 |
| CCR5-2938 | + | UUAAAUGUAGAGGGGGAUCC | 20 | 2344 |
| CCR5-2939 | − | ACAGGGUUAAUGUGAAGUCC | 20 | 2345 |
| CCR5-2940 | − | AUUGAUUUGCACAGCUCAUC | 20 | 2346 |
| CCR5-2941 | + | UAAGCUAGAGAAUAGAUCUC | 20 | 2347 |
| CCR5-2942 | + | AACGGAUGUCUCAGCUCUUC | 20 | 2348 |
| CCR5-2943 | − | CGGGGAGAGUGGAGAAAAAG | 20 | 2349 |
| CCR5-2944 | + | AACCAACUUUAAAUGUAGAG | 20 | 2350 |
| CCR5-2945 | + | CAGAAGGCAUCUCACUGGAG | 20 | 2351 |
| CCR5-2946 | + | UAACAGGCCAAGCAGCUGAG | 20 | 2352 |
| CCR5-2947 | + | CUGCAAAUCUUUCUUUUGAG | 20 | 2353 |
| CCR5-2948 | − | UGGGGGUUGGGGUGGGAUAG | 20 | 2354 |
| CCR5-2949 | + | UAAACCAACUUUAAAUGUAG | 20 | 2355 |
| CCR5-2950 | − | UUCUAACAGAUUCUGUGUAG | 20 | 2356 |
| CCR5-2951 | − | GGGGUGGGAUAGGGGAUACG | 20 | 2357 |
| CCR5-2952 | + | AAUGCUGUUUCUUUUGAAGG | 20 | 2358 |
| CCR5-2953 | + | ACCAACUUUAAAUGUAGAGG | 20 | 2359 |
| CCR5-2954 | + | CUGUUUCUUUUGAAGGAGGG | 20 | 2360 |
| CCR5-2955 | − | CAUCUGUGUGGGGGUUGGGG | 20 | 2361 |
| CCR5-2956 | − | CAGAGAACAAUAAUAUUGGG | 20 | 2362 |
| CCR5-2957 | − | GGUGGUGAGCAUCUGUGUGG | 20 | 2363 |
| CCR5-2958 | − | UAAUUUCUUUUACUAAAAUG | 20 | 2364 |
| CCR5-2959 | − | UUGGGUGGUGAGCAUCUGUG | 20 | 2365 |
| CCR5-2960 | − | GGGUGGUGAGCAUCUGUGUG | 20 | 2366 |
| CCR5-2961 | − | GAGCAUCUGUGUGGGGGUUG | 20 | 2367 |
| CCR5-2962 | − | UGUGGGGGUUGGGGUGGGAU | 20 | 2368 |
| CCR5-2963 | − | UUUACAGAGAACAAUAAUAU | 20 | 2369 |
| CCR5-2964 | + | GUUUGCCAAAUGUCUUCUAU | 20 | 2370 |
| CCR5-2965 | − | UAAGUAACCUCUCAGCUGCU | 20 | 2371 |
| CCR5-2966 | − | UGUACAAAUCAUUUGCUUCU | 20 | 2372 |
| CCR5-2967 | + | CAUAUAGACAGUAUAAAAGU | 20 | 2373 |
| CCR5-2968 | − | CAUUUAAAGUUGGUUUAAGU | 20 | 2374 |
| CCR5-2969 | − | UCUAACAGAUUCUGUGUAGU | 20 | 2375 |
| CCR5-2970 | − | GUGAGCAUCUGUGUGGGGGU | 20 | 2376 |
| CCR5-2971 | − | AUCUGUGUGGGGGUUGGGGU | 20 | 2377 |
| CCR5-2972 | − | AAUUUCUUUUACUAAAAUGU | 20 | 2378 |
| CCR5-2973 | − | UGGGUGGUGAGCAUCUGUGU | 20 | 2379 |
| CCR5-2974 | + | UACCGGGGAGAGUUUCUUGU | 20 | 2380 |
| CCR5-2975 | − | GGAAACCCAUAGAAGACAUU | 20 | 2381 |
| CCR5-2976 | − | UUACAGAGAACAAUAAUAUU | 20 | 2382 |
| CCR5-2977 | − | AUAAGGAAAGGGUCACAGUU | 20 | 2383 |
| CCR5-2978 | − | UGAGCAUCUGUGUGGGGGUU | 20 | 2384 |

[0664] Table 5C provides exemplary targeting domains for knocking down the CCR5 gene selected according to the third tier parameters. Within the additional 500 bp (e.g., upstream or downstream) of a transcription start site (TSS), e.g., extending to 1kb upstream and downstream of a TSS. It is contemplated herein that in an embodiment the targeting domain hybridizes to the target domain through complementary base pairing. Any of the targeting domains in the table can be used with a S. pyogenes eiCas9 molecule or eiCas9 fusion protein (e.g., an eiCas9 fused to a transcription repressor domain) to alter the CCR5 gene (e.g., reduce or eliminate CCR5 gene expression, CCR5 protein function, or the level of CCR5 protein). One or more gRNAs may be used to target an eiCas9 to the promoter region of the CCR5 gene.

TABLE 5C
3rd Tier

| | | | Target | |
|---|---|---|---|---|
| gRNA | DNA | | Site | SEQ ID |
| Name | Strand | Targeting Domain | Length | NO |
| CCR5-2979 | − | AGAGGGAAGCCUAAAAA | 17 | 2385 |
| CCR5-2980 | + | AUGCUUACUGGUUUGAA | 17 | 2386 |
| CCR5-2981 | − | GGAGUUUGAGACUCACA | 17 | 2387 |
| CCR5-2982 | + | UUUUUAUUCUAGAGCCA | 17 | 2388 |
| CCR5-2983 | − | GCCUAGUCUAAGGUGCA | 17 | 2389 |
| CCR5-2984 | − | UUUUAACUAUGGGCUCA | 17 | 2390 |
| CCR5-2985 | + | UUCUAGAGCCAAGGUCA | 17 | 2391 |
| CCR5-2986 | − | CUAAUAUAUCAGUUUCA | 17 | 2392 |
| CCR5-2987 | + | CUGGGUCCAGAAAAAGA | 17 | 2393 |
| CCR5-2988 | − | UUUUCCUCCAGACAAGA | 17 | 2394 |
| CCR5-2989 | − | GCUUGUGAUCUCUAAGA | 17 | 2395 |
| CCR5-2990 | + | GGUCACGGAAGCCCAGA | 17 | 2396 |
| CCR5-2991 | + | AAUGCUUACUGGUUUGA | 17 | 2397 |
| CCR5-2992 | − | CACAUGACAUAAGUAUA | 17 | 2398 |
| CCR5-2993 | − | CUAAAGAGUUUUAACUA | 17 | 2399 |
| CCR5-2994 | − | CUCAGCUGCCUAGUCUA | 17 | 2400 |
| CCR5-2995 | − | AAAAAUGAGCUUUUCUA | 17 | 2401 |
| CCR5-2996 | − | UAGUAUAUAAUUCUUUA | 17 | 2402 |
| CCR5-2997 | − | UCACGGGUGAGCUAAAC | 17 | 2403 |
| CCR5-2998 | + | AAAACUCUUUAGACAAC | 17 | 2404 |
| CCR5-2999 | − | GGGAGUUUGAGACUCAC | 17 | 2405 |
| CCR5-3000 | − | UUUAACUAUGGGCUCAC | 17 | 2406 |
| CCR5-3001 | + | UCCUCAUAAAUGCUUAC | 17 | 2407 |
| CCR5-3002 | − | CAUCUUUUUCUGGACCC | 17 | 2408 |
| CCR5-3003 | − | UCAUCUAUGACCUUCCC | 17 | 2409 |
| CCR5-3004 | + | AAUCCCCACUAAGAUCC | 17 | 2410 |
| CCR5-3005 | − | AGACUAGGCAAGACAGC | 17 | 2411 |
| CCR5-3006 | − | CCAGAUACAUAGGUGGC | 17 | 2412 |
| CCR5-3007 | − | UGCCUAGUCUAAGGUGC | 17 | 2413 |
| CCR5-3008 | + | UUCAGAUAGAUUAUAUC | 17 | 2414 |
| CCR5-3009 | + | CCUGCCACCUAUGUAUC | 17 | 2415 |
| CCR5-3010 | − | AGCCACAAGAUGCCCUC | 17 | 2416 |
| CCR5-3011 | + | AGGGCAUCUUGUGGCUC | 17 | 2417 |
| CCR5-3012 | − | GAAGUUGUGUCUAAGUC | 17 | 2418 |
| CCR5-3013 | + | UAGGCUUCCCUCUUGUC | 17 | 2419 |
| CCR5-3014 | + | AUGAAUGUCAUGCAUUC | 17 | 2420 |
| CCR5-3015 | − | AGUAUAUGGUCAAGUUC | 17 | 2421 |
| CCR5-3016 | − | GGUUUCCCAUCUUUUUC | 17 | 2422 |
| CCR5-3017 | − | UUUUUCCUCCAGACAAG | 17 | 2423 |
| CCR5-3018 | − | UGCCCCCAAUCCUACAG | 17 | 2424 |
| CCR5-3019 | + | AGGUCACGGAAGCCCAG | 17 | 2425 |
| CCR5-3020 | − | AAAAUGAGCUUUUCUAG | 17 | 2426 |
| CCR5-3021 | + | UGAAACUGAUAUAUUAG | 17 | 2427 |
| CCR5-3022 | − | UGGACCCAGGAUCUUAG | 17 | 2428 |
| CCR5-3023 | − | UAUGCCAGAUACAUAGG | 17 | 2429 |
| CCR5-3024 | + | GCUUCCCUCUUGUCUGG | 17 | 2430 |
| CCR5-3025 | − | AUGACAUUCAUCUGUGG | 17 | 2431 |
| CCR5-3026 | + | UGCCUCUGUAGGAUUGG | 17 | 2432 |
| CCR5-3027 | − | AUAUCAAGCUCUCUUGG | 17 | 2433 |
| CCR5-3028 | + | CAUAUACUUAUGUCAUG | 17 | 2434 |
| CCR5-3029 | − | ACCAGUAAGCAUUUAUG | 17 | 2435 |
| CCR5-3030 | − | UGCAUGACAUUCAUCUG | 17 | 2436 |
| CCR5-3031 | − | GACCCAGGAUCUUAGUG | 17 | 2437 |
| CCR5-3032 | − | ACUUCACAGAAAAUGUG | 17 | 2438 |
| CCR5-3033 | − | AUGACAACUCUUAAUUG | 17 | 2439 |
| CCR5-3034 | + | CUGCCUCUGUAGGAUUG | 17 | 2440 |
| CCR5-3035 | + | GCCCAGAGGGCAUCUUG | 17 | 2441 |
| CCR5-3036 | + | UUAGACACAACUUCUUG | 17 | 2442 |
| CCR5-3037 | + | CGUAAUUUUGCUGUUUG | 17 | 2443 |
| CCR5-3038 | − | UGUGAGGAUUUUACAAU | 17 | 2444 |
| CCR5-3039 | − | CACUAUGCCAGAUACAU | 17 | 2445 |
| CCR5-3040 | + | UGGGUCCAGAAAAAGAU | 17 | 2446 |
| CCR5-3041 | − | UAAAGAGUUUUAACUAU | 17 | 2447 |
| CCR5-3042 | − | CUGAACUUAAAUAGACU | 17 | 2448 |
| CCR5-3043 | + | UCCCUGCACCUUAGACU | 17 | 2449 |
| CCR5-3044 | − | CUGGGCUUCCGUGACCU | 17 | 2450 |
| CCR5-3045 | − | CAUCUAUGACCUUCCCU | 17 | 2451 |
| CCR5-3046 | + | AUCCCCACUAAGAUCCU | 17 | 2452 |
| CCR5-3047 | + | GAGGGCAUCUUGUGGCU | 17 | 2453 |
| CCR5-3048 | − | GCCACAAGAUGCCCUCU | 17 | 2454 |
| CCR5-3049 | − | GUCAUAUCAAGCUCUCU | 17 | 2455 |
| CCR5-3050 | + | UGAAUGUCAUGCAUUCU | 17 | 2456 |
| CCR5-3051 | − | UUUAUUAUAUUAUUUCU | 17 | 2457 |
| CCR5-3052 | − | UAAAAAUGAGCUUUUCU | 17 | 2458 |
| CCR5-3053 | − | GGACCCAGGAUCUUAGU | 17 | 2459 |
| CCR5-3054 | − | CAAGCUCUCUUGGCGGU | 17 | 2460 |
| CCR5-3055 | + | UAGACACAACUUCUUGU | 17 | 2461 |
| CCR5-3056 | + | UCUGCCUCUGUAGGAUU | 17 | 2462 |
| CCR5-3057 | + | UAGAGGAAAAUUUUAUU | 17 | 2463 |
| CCR5-3058 | − | UCUAGAAUAAAAAGCUU | 17 | 2464 |
| CCR5-3059 | − | UUAUUAUAUUAUUUCUU | 17 | 2465 |
| CCR5-3060 | + | CACGUAAUUUUGCUGUU | 17 | 2466 |
| CCR5-3061 | + | ACGUAAUUUUGCUGUUU | 17 | 2467 |
| CCR5-3062 | + | UAAUUUUGACCAUUUUU | 17 | 2468 |
| CCR5-3063 | − | ACAAGAGGGAAGCCUAAAAA | 20 | 2469 |
| CCR5-3064 | + | UAAAUGCUUACUGGUUUGAA | 20 | 2470 |
| CCR5-3065 | − | CAGGGAGUUUGAGACUCACA | 20 | 2471 |
| CCR5-3066 | + | AGCUUUUUAUUCUAGAGCCA | 20 | 2472 |
| CCR5-3067 | − | GCUGCCUAGUCUAAGGUGCA | 20 | 2473 |
| CCR5-3068 | − | GAGUUUUAACUAUGGGCUCA | 20 | 2474 |
| CCR5-3069 | + | UUAUUCUAGAGCCAAGGUCA | 20 | 2475 |
| CCR5-3070 | − | CCUCUAAUAUAUCAGUUUCA | 20 | 2476 |
| CCR5-3071 | + | AUCCUGGGUCCAGAAAAAGA | 20 | 2477 |
| CCR5-3072 | − | UCUUUUUCCUCCAGACAAGA | 20 | 2478 |
| CCR5-3073 | − | UUGGCUUGUGAUCUCUAAGA | 20 | 2479 |
| CCR5-3074 | + | CAAGGUCACGGAAGCCCAGA | 20 | 2480 |
| CCR5-3075 | + | AUAAAUGCUUACUGGUUUGA | 20 | 2481 |
| CCR5-3076 | − | UUCCACAUGACAUAAGUAUA | 20 | 2482 |
| CCR5-3077 | − | UGUCUAAAGAGUUUUAACUA | 20 | 2483 |
| CCR5-3078 | − | UCUCUCAGCUGCCUAGUCUA | 20 | 2484 |
| CCR5-3079 | − | AUUAAAAAUGAGCUUUUCUA | 20 | 2485 |
| CCR5-3080 | − | AGUUAGUAUAUAAUUCUUUA | 20 | 2486 |
| CCR5-3081 | − | GGCUCACGGGUGAGCUAAAC | 20 | 2487 |
| CCR5-3082 | + | GUUAAAACUCUUUAGACAAC | 20 | 2488 |
| CCR5-3083 | − | GCAGGGAGUUUGAGACUCAC | 20 | 2489 |
| CCR5-3084 | − | AGUUUUAACUAUGGGCUCAC | 20 | 2490 |
| CCR5-3085 | + | GAGUCCUCAUAAAUGCUUAC | 20 | 2491 |
| CCR5-3086 | − | UCCCAUCUUUUUCUGGACCC | 20 | 2492 |
| CCR5-3087 | − | UUGUCAUCUAUGACCUUCCC | 20 | 2493 |
| CCR5-3088 | + | GAAAAUCCCCACUAAGAUCC | 20 | 2494 |
| CCR5-3089 | − | AAUAGACUAGGCAAGACAGC | 20 | 2495 |
| CCR5-3090 | − | AUGCCAGAUACAUAGGUGGC | 20 | 2496 |
| CCR5-3091 | − | AGCUGCCUAGUCUAAGGUGC | 20 | 2497 |
| CCR5-3092 | + | AGCUUCAGAUAGAUUAUAUC | 20 | 2498 |
| CCR5-3093 | + | AAUCCUGCCACCUAUGUAUC | 20 | 2499 |
| CCR5-3094 | − | CCGAGCCACAAGAUGCCCUC | 20 | 2500 |
| CCR5-3095 | + | CAGAGGGCAUCUUGUGGCUC | 20 | 2501 |
| CCR5-3096 | − | CAAGAAGUUGUGUCUAAGUC | 20 | 2502 |
| CCR5-3097 | + | UUUUAGGCUUCCCUCUUGUC | 20 | 2503 |
| CCR5-3098 | + | CAGAUGAAUGUCAUGCAUUC | 20 | 2504 |
| CCR5-3099 | − | AUAAGUAUAUGGUCAAGUUC | 20 | 2505 |
| CCR5-3100 | − | ACAGGUUUCCCAUCUUUUUC | 20 | 2506 |
| CCR5-3101 | − | UUCUUUUUCCUCCAGACAAG | 20 | 2507 |
| CCR5-3102 | − | ACGUGCCCCCAAUCCUACAG | 20 | 2508 |
| CCR5-3103 | + | CCAAGGUCACGGAAGCCCAG | 20 | 2509 |
| CCR5-3104 | − | UUAAAAAUGAGCUUUUCUAG | 20 | 2510 |
| CCR5-3105 | + | CCAUGAAACUGAUAUAUUAG | 20 | 2511 |
| CCR5-3106 | − | UUCUGGACCCAGGAUCUUAG | 20 | 2512 |
| CCR5-3107 | − | CACUAUGCCAGAUACAUAGG | 20 | 2513 |
| CCR5-3108 | + | UAGGCUUCCCUCUUGUCUGG | 20 | 2514 |
| CCR5-3109 | − | UGCAUGACAUUCAUCUGUGG | 20 | 2515 |
| CCR5-3110 | − | GUCAUAUCAAGCUCUCUUGG | 20 | 2516 |
| CCR5-3111 | + | GACCAUAUACUUAUGUCAUG | 20 | 2517 |
| CCR5-3112 | − | CAAACCAGUAAGCAUUUAUG | 20 | 2518 |
| CCR5-3113 | − | GAAUGCAUGACAUUCAUCUG | 20 | 2519 |
| CCR5-3114 | − | CUGGACCCAGGAUCUUAGUG | 20 | 2520 |
| CCR5-3115 | − | CAAACUUCACAGAAAAUGUG | 20 | 2521 |
| CCR5-3116 | − | UGUAUGACAACUCUUAAUUG | 20 | 2522 |
| CCR5-3117 | + | GAAGCCCAGAGGGCAUCUUG | 20 | 2523 |
| CCR5-3118 | + | GACUUAGACACAACUUCUUG | 20 | 2524 |
| CCR5-3119 | + | GCACGUAAUUUUGCUGUUUG | 20 | 2525 |
| CCR5-3120 | − | AAAUGUGAGGAUUUUACAAU | 20 | 2526 |
| CCR5-3121 | − | UCACACUAUGCCAGAUACAU | 20 | 2527 |
| CCR5-3122 | + | UCCUGGGUCCAGAAAAAGAU | 20 | 2528 |
| CCR5-3123 | − | GUCUAAAGAGUUUUAACUAU | 20 | 2529 |
| CCR5-3124 | − | CAGCUGAACUUAAAUAGACU | 20 | 2530 |
| CCR5-3125 | + | AACUCCCUGCACCUUAGACU | 20 | 2531 |
| CCR5-3126 | − | CCUCUGGGCUUCCGUGACCU | 20 | 2532 |
| CCR5-3127 | − | UGUCAUCUAUGACCUUCCCU | 20 | 2533 |
| CCR5-3128 | + | AAAAUCCCCACUAAGAUCCU | 20 | 2534 |
| CCR5-3129 | + | CCAGAGGGCAUCUUGUGGCU | 20 | 2535 |
| CCR5-3130 | − | CGAGCCACAAGAUGCCCUCU | 20 | 2536 |
| CCR5-3131 | − | ACAGUCAUAUCAAGCUCUCU | 20 | 2537 |
| CCR5-3132 | + | AGAUGAAUGUCAUGCAUUCU | 20 | 2538 |
| CCR5-3133 | − | UUUUUUAUUAUAUUAUUUCU | 20 | 2539 |
| CCR5-3134 | − | AAUUAAAAAUGAGCUUUUCU | 20 | 2540 |
| CCR5-3135 | − | UCUGGACCCAGGAUCUUAGU | 20 | 2541 |
| CCR5-3136 | − | UAUCAAGCUCUCUUGGCGGU | 20 | 2542 |
| CCR5-3137 | + | ACUUAGACACAACUUCUUGU | 20 | 2543 |
| CCR5-3138 | + | UAUUAGAGGAAAAUUUUAUU | 20 | 2544 |
| CCR5-3139 | − | GGCUCUAGAAUAAAAAGCUU | 20 | 2545 |
| CCR5-3140 | − | UUUUUAUUAUAUUAUUUCUU | 20 | 2546 |
| CCR5-3141 | + | GGGCACGUAAUUUUGCUGUU | 20 | 2547 |
| CCR5-3142 | + | GGCACGUAAUUUUGCUGUUU | 20 | 2548 |
| CCR5-3143 | + | UAUUAAUUUUGACCAUUUUU | 20 | 2549 |

[0665] Table 6A provides exemplary targeting domains for knocking down the CCR5 gene selected according to the first tier parameters. The targeting domains bind within 500 bp (e.g., upstream or downstream) of a transcription start site (TSS), have a high level of orthogonality and PAM is NNGRRT. It is contemplated herein that in an embodiment the targeting domain hybridizes to the target domain through complementary base pairing. Any of the targeting domains in the table can be used with a S. aureus eiCas9 molecule or eiCas9 fusion protein (e.g., an eiCas9 fused to a transcription repressor domain) to alter the CCR5 gene (e.g., reduce or eliminate CCR5 gene expression, CCR5 protein function, or the level of CCR5 protein). One or more gRNAs may be used to target an eiCas9 to the promoter region of the CCR5 gene.

TABLE 6A
1st Tier

| gRNA | DNA | | Target Site | SEQ ID |
|---|---|---|---|---|
| Name | Strand | Targeting Domain | Length | NO |
| CCR5-3144 | + | AAGUGUAUUGAAGGCGAA | 18 | 2550 |
| CCR5-3145 | + | UAAGUGUAUUGAAGGCGAA | 19 | 2551 |
| CCR5-3146 | + | UUAAGUGUAUUGAAGGCGAA | 20 | 2552 |
| CCR5-3147 | + | AUUAAGUGUAUUGAAGGCGAA | 21 | 2553 |
| CCR5-3148 | + | CAUUAAGUGUAUUGAAGGCGAA | 22 | 2554 |
| CCR5-3149 | + | UCAUUAAGUGUAUUGAAGGCGAA | 23 | 2555 |
| CCR5-3150 | + | AUCAUUAAGUGUAUUGAAGGCGAA | 24 | 2556 |
| CCR5-3151 | + | UUCUCUGCUCAUCCCACUACA | 21 | 2557 |
| CCR5-3152 | + | GUUCUCUGCUCAUCCCACUACA | 22 | 2558 |
| CCR5-3153 | + | UGUUCUCUGCUCAUCCCACUACA | 23 | 2559 |
| CCR5-3154 | + | UUGUUCUCUGCUCAUCCCACUACA | 24 | 2560 |
| CCR5-3155 | + | AUUUACGGGCUUUUCUCA | 18 | 2561 |
| CCR5-3156 | + | UAUUUACGGGCUUUUCUCA | 19 | 2562 |
| CCR5-3157 | + | UUAUUUACGGGCUUUUCUCA | 20 | 2563 |
| CCR5-3158 | + | UUUAUUUACGGGCUUUUCUCA | 21 | 2564 |
| CCR5-3159 | + | GUUUAUUUACGGGCUUUUCUCA | 22 | 2565 |
| CCR5-3160 | + | GGUUUAUUUACGGGCUUUUCUCA | 23 | 2566 |
| CCR5-3161 | + | AGGUUUAUUUACGGGCUUUUCUCA | 24 | 2567 |
| CCR5-3162 | + | GGGAGAGUUUCUUGUAGGGGA | 21 | 2568 |
| CCR5-3163 | + | GGGGAGAGUUUCUUGUAGGGGA | 22 | 2569 |
| CCR5-3164 | + | CGGGGAGAGUUUCUUGUAGGGGA | 23 | 2570 |
| CCR5-3165 | + | CCGGGGAGAGUUUCUUGUAGGGGA | 24 | 2571 |
| CCR5-3166 | + | UUCAGAAGGCAUCUCACUGGA | 21 | 2572 |
| CCR5-3167 | + | AUUCAGAAGGCAUCUCACUGGA | 22 | 2573 |
| CCR5-3168 | + | UAUUCAGAAGGCAUCUCACUGGA | 23 | 2574 |
| CCR5-3169 | + | AUAUUCAGAAGGCAUCUCACUGGA | 24 | 2575 |
| CCR5-3170 | + | UGAGCUUAAAAUAAGCUA | 18 | 2576 |
| CCR5-3171 | + | UUGAGCUUAAAAUAAGCUA | 19 | 2577 |
| CCR5-3172 | + | GUUGAGCUUAAAAUAAGCUA | 20 | 2578 |
| CCR5-3173 | + | GAAAUGCUGUUUCUUUUGAAG | 21 | 2579 |
| CCR5-3174 | + | GGAAAUGCUGUUUCUUUUGAAG | 22 | 2580 |
| CCR5-3175 | + | AGGAAAUGCUGUUUCUUUUGAAG | 23 | 2581 |
| CCR5-3176 | + | UAGGAAAUGCUGUUUCUUUUGAAG | 24 | 2582 |
| CCR5-3177 | + | AAACCAACUUUAAAUGUAGAG | 21 | 2583 |
| CCR5-3178 | + | UAAACCAACUUUAAAUGUAGAG | 22 | 2584 |
| CCR5-3179 | + | UUAAACCAACUUUAAAUGUAGAG | 23 | 2585 |
| CCR5-3180 | + | CUUAAACCAACUUUAAAUGUAGAG | 24 | 2586 |
| CCR5-3181 | + | GCUGUUUCUUUUGAAGGAGGG | 21 | 2587 |
| CCR5-3182 | + | UGCUGUUUCUUUUGAAGGAGGG | 22 | 2588 |
| CCR5-3183 | + | AUGCUGUUUCUUUUGAAGGAGGG | 23 | 2589 |
| CCR5-3184 | + | AAUGCUGUUUCUUUUGAAGGAGGG | 24 | 2590 |
| CCR5-3185 | + | GCUGAGAGGUUACUUACCGGG | 21 | 2591 |
| CCR5-3186 | + | AGCUGAGAGGUUACUUACCGGG | 22 | 2592 |
| CCR5-3187 | + | CAGCUGAGAGGUUACUUACCGGG | 23 | 2593 |
| CCR5-3188 | + | GCAGCUGAGAGGUUACUUACCGGG | 24 | 2594 |
| CCR5-3189 | + | CAAAUCUUUCUUUUGAGAGGU | 21 | 2595 |
| CCR5-3190 | + | GCAAAUCUUUCUUUUGAGAGGU | 22 | 2596 |
| CCR5-3191 | + | UGCAAAUCUUUCUUUUGAGAGGU | 23 | 2597 |
| CCR5-3192 | + | CUGCAAAUCUUUCUUUUGAGAGGU | 24 | 2598 |
| CCR5-3193 | − | AGGAAAGGGUCACAGUUUGGA | 21 | 2599 |
| CCR5-3194 | − | AAGGAAAGGGUCACAGUUUGGA | 22 | 2600 |
| CCR5-3195 | − | UAAGGAAAGGGUCACAGUUUGGA | 23 | 2601 |
| CCR5-3196 | − | AUAAGGAAAGGGUCACAGUUUGGA | 24 | 2602 |
| CCR5-3197 | − | ACACAGGGUUAAUGUGAAGUC | 21 | 2603 |
| CCR5-3198 | − | GACACAGGGUUAAUGUGAAGUC | 22 | 2604 |
| CCR5-3199 | − | GGACACAGGGUUAAUGUGAAGUC | 23 | 2605 |
| CCR5-3200 | − | GGGACACAGGGUUAAUGUGAAGUC | 24 | 2606 |
| CCR5-3201 | − | GCCUGUUAGUUAGCUUCUGAG | 21 | 2607 |
| CCR5-3202 | − | GGCCUGUUAGUUAGCUUCUGAG | 22 | 2608 |
| CCR5-3203 | − | UGGCCUGUUAGUUAGCUUCUGAG | 23 | 2609 |
| CCR5-3204 | − | UUGGCCUGUUAGUUAGCUUCUGAG | 24 | 2610 |
| CCR5-3205 | − | AUGUGGGCUUUUGACUAG | 18 | 2611 |
| CCR5-3206 | − | AAUGUGGGCUUUUGACUAG | 19 | 2612 |
| CCR5-3207 | − | AAAUGUGGGCUUUUGACUAG | 20 | 2613 |
| CCR5-3208 | − | AAAAUGUGGGCUUUUGACUAG | 21 | 2614 |
| CCR5-3209 | − | UAAAAUGUGGGCUUUUGACUAG | 22 | 2615 |
| CCR5-3210 | − | CUAAAAUGUGGGCUUUUGACUAG | 23 | 2616 |
| CCR5-3211 | − | ACUAAAAUGUGGGCUUUUGACUAG | 24 | 2617 |
| CCR5-3212 | − | UUUCUAACAGAUUCUGUGUAG | 21 | 2618 |
| CCR5-3213 | − | UUUUCUAACAGAUUCUGUGUAG | 22 | 2619 |
| CCR5-3214 | − | AUUUUCUAACAGAUUCUGUGUAG | 23 | 2620 |
| CCR5-3215 | − | UAUUUUCUAACAGAUUCUGUGUAG | 24 | 2621 |
| CCR5-3216 | − | GGGUGGGAUAGGGGAUACGGG | 21 | 2622 |
| CCR5-3217 | − | GGGGUGGGAUAGGGGAUACGGG | 22 | 2623 |
| CCR5-3218 | − | UGGGGUGGGAUAGGGGAUACGGG | 23 | 2624 |
| CCR5-3219 | − | UUGGGGUGGGAUAGGGGAUACGGG | 24 | 2625 |
| CCR5-3220 | − | AGCAACUCUUAAGAUAAU | 18 | 2626 |
| CCR5-3221 | − | UAGCAACUCUUAAGAUAAU | 19 | 2627 |
| CCR5-3222 | − | AUAGCAACUCUUAAGAUAAU | 20 | 2628 |
| CCR5-3223 | − | AAUAGCAACUCUUAAGAUAAU | 21 | 2629 |
| CCR5-3224 | − | UAAUAGCAACUCUUAAGAUAAU | 22 | 2630 |
| CCR5-3225 | − | UUAAUAGCAACUCUUAAGAUAAU | 23 | 2631 |
| CCR5-3226 | − | AUUAAUAGCAACUCUUAAGAUAAU | 24 | 2632 |
| CCR5-3227 | − | GGUGAGCAUCUGUGUGGGGGU | 21 | 2633 |
| CCR5-3228 | − | UGGUGAGCAUCUGUGUGGGGGU | 22 | 2634 |
| CCR5-3229 | − | GUGGUGAGCAUCUGUGUGGGGGU | 23 | 2635 |
| CCR5-3230 | − | GGUGGUGAGCAUCUGUGUGGGGGU | 24 | 2636 |
| CCR5-3231 | − | UUGGGUGGUGAGCAUCUGUGU | 21 | 2637 |
| CCR5-3232 | − | AUUGGGUGGUGAGCAUCUGUGU | 22 | 2638 |
| CCR5-3233 | − | UAUUGGGUGGUGAGCAUCUGUGU | 23 | 2639 |
| CCR5-3234 | − | AUAUUGGGUGGUGAGCAUCUGUGU | 24 | 2640 |
| CCR5-3235 | − | UCAAAGAUACAAAACAUGAUU | 21 | 2641 |
| CCR5-3236 | − | AUCAAAGAUACAAAACAUGAUU | 22 | 2642 |
| CCR5-3237 | − | CAUCAAAGAUACAAAACAUGAUU | 23 | 2643 |
| CCR5-3238 | − | ACAUCAAAGAUACAAAACAUGAUU | 24 | 2644 |
| CCR5-3239 | − | CCCUCUCCAGUGAGAUGCCUU | 21 | 2645 |
| CCR5-3240 | − | ACCCUCUCCAGUGAGAUGCCUU | 22 | 2646 |
| CCR5-3241 | − | AACCCUCUCCAGUGAGAUGCCUU | 23 | 2647 |
| CCR5-3242 | − | AAACCCUCUCCAGUGAGAUGCCUU | 24 | 2648 |

[0666] Table 6B provides exemplary targeting domains for knocking down the CCR5 gene selected according to the second tier parameters. The targeting domains bind within 500 bp (e.g., upstream or downstream) of a transcription start site (TSS) and PAM is NNGRRT. It is contemplated herein that in an embodiment the targeting domain hybridizes to the target domain through complementary base pairing. Any of the targeting domains in the table can be used with a S. aureus eiCas9 molecule or eiCas9 fusion protein (e.g., an eiCas9 fused to a transcription repressor domain) to alter the CCR5 gene (e.g., reduce or eliminate CCR5 gene expression, CCR5 protein function, or the level of CCR5 protein). One or more gRNAs may be used to target an eiCas9 to the promoter region of the CCR5 gene.

TABLE 6B
2nd Tier

| gRNA | DNA | | Target Site | SEQ ID |
|---|---|---|---|---|
| Name | Strand | Targeting Domain | Length | NO |
| CCR5-3243 | + | UCUGCUCAUCCCACUACA | 18 | 2649 |
| CCR5-3244 | + | CUCUGCUCAUCCCACUACA | 19 | 2650 |
| CCR5-3245 | + | UCUCUGCUCAUCCCACUACA | 20 | 2651 |
| CCR5-3246 | + | AGAGUUUCUUGUAGGGGA | 18 | 2652 |
| CCR5-3247 | + | GAGAGUUUCUUGUAGGGGA | 19 | 2653 |
| CCR5-3248 | + | GGAGAGUUUCUUGUAGGGGA | 20 | 2654 |
| CCR5-3249 | + | AGAAGGCAUCUCACUGGA | 18 | 2655 |
| CCR5-3250 | + | CAGAAGGCAUCUCACUGGA | 19 | 2656 |
| CCR5-3251 | + | UCAGAAGGCAUCUCACUGGA | 20 | 2657 |
| CCR5-3252 | + | UAGAAAAUAUAAAGAAUA | 18 | 2658 |
| CCR5-3253 | + | UUAGAAAAUAUAAAGAAUA | 19 | 2659 |
| CCR5-3254 | + | GUUAGAAAAUAUAAAGAAUA | 20 | 2660 |
| CCR5-3255 | + | UGUUAGAAAAUAUAAAGAAUA | 21 | 2661 |
| CCR5-3256 | + | CUGUUAGAAAAUAUAAAGAAUA | 22 | 2662 |
| CCR5-3257 | + | UCUGUUAGAAAAUAUAAAGAAUA | 23 | 2663 |
| CCR5-3258 | + | AUCUGUUAGAAAAUAUAAAGAAUA | 24 | 2664 |
| CCR5-3259 | + | AAUCUGUUAGAAAAUAUA | 18 | 2665 |
| CCR5-3260 | + | GAAUCUGUUAGAAAAUAUA | 19 | 2666 |
| CCR5-3261 | + | AGAAUCUGUUAGAAAAUAUA | 20 | 2667 |
| CCR5-3262 | + | CAGAAUCUGUUAGAAAAUAUA | 21 | 2668 |
| CCR5-3263 | + | ACAGAAUCUGUUAGAAAAUAUA | 22 | 2669 |
| CCR5-3264 | + | CACAGAAUCUGUUAGAAAAUAUA | 23 | 2670 |
| CCR5-3265 | + | ACACAGAAUCUGUUAGAAAAUAUA | 24 | 2671 |
| CCR5-3266 | + | AGUUGAGCUUAAAAUAAGCUA | 21 | 2672 |
| CCR5-3267 | + | AAGUUGAGCUUAAAAUAAGCUA | 22 | 2673 |
| CCR5-3268 | + | UAAGUUGAGCUUAAAAUAAGCUA | 23 | 2674 |
| CCR5-3269 | + | UUAAGUUGAGCUUAAAAUAAGCUA | 24 | 2675 |
| CCR5-3270 | + | AUGCUGUUUCUUUUGAAG | 18 | 2676 |
| CCR5-3271 | + | AAUGCUGUUUCUUUUGAAG | 19 | 2677 |
| CCR5-3272 | + | AAAUGCUGUUUCUUUUGAAG | 20 | 2678 |
| CCR5-3273 | + | CCAACUUUAAAUGUAGAG | 18 | 2679 |
| CCR5-3274 | + | ACCAACUUUAAAUGUAGAG | 19 | 2680 |
| CCR5-2944 | + | AACCAACUUUAAAUGUAGAG | 20 | 2681 |
| CCR5-3275 | + | GUUUCUUUUGAAGGAGGG | 18 | 2682 |
| CCR5-3276 | + | UGUUUCUUUUGAAGGAGGG | 19 | 2683 |
| CCR5-2954 | + | CUGUUUCUUUUGAAGGAGGG | 20 | 2684 |
| CCR5-3277 | + | GAGAGGUUACUUACCGGG | 18 | 2685 |
| CCR5-3278 | + | UGAGAGGUUACUUACCGGG | 19 | 2686 |
| CCR5-3279 | + | CUGAGAGGUUACUUACCGGG | 20 | 2687 |
| CCR5-3280 | + | GUUUGCCAAAUGUCUUCU | 18 | 2688 |
| CCR5-3281 | + | UGUUUGCCAAAUGUCUUCU | 19 | 2689 |
| CCR5-3282 | + | GUGUUUGCCAAAUGUCUUCU | 20 | 2690 |
| CCR5-3283 | + | GGUGUUUGCCAAAUGUCUUCU | 21 | 2691 |
| CCR5-3284 | + | UGGUGUUUGCCAAAUGUCUUCU | 22 | 2692 |
| CCR5-3285 | + | UUGGUGUUUGCCAAAUGUCUUCU | 23 | 2693 |
| CCR5-3286 | + | CUUGGUGUUUGCCAAAUGUCUUCU | 24 | 2694 |
| CCR5-3287 | + | AUCUUUCUUUUGAGAGGU | 18 | 2695 |
| CCR5-3288 | + | AAUCUUUCUUUUGAGAGGU | 19 | 2696 |
| CCR5-3289 | + | AAAUCUUUCUUUUGAGAGGU | 20 | 2697 |
| CCR5-3290 | + | GAAAAUUCUGAUUAUCUU | 18 | 2698 |
| CCR5-3291 | + | AGAAAAUUCUGAUUAUCUU | 19 | 2699 |
| CCR5-3292 | + | AAGAAAAUUCUGAUUAUCUU | 20 | 2700 |
| CCR5-3293 | + | UAAGAAAAUUCUGAUUAUCUU | 21 | 2701 |
| CCR5-3294 | + | UUAAGAAAAUUCUGAUUAUCUU | 22 | 2702 |
| CCR5-3295 | + | GUUAAGAAAAUUCUGAUUAUCUU | 23 | 2703 |
| CCR5-3296 | + | GGUUAAGAAAAUUCUGAUUAUCUU | 24 | 2704 |
| CCR5-3297 | − | GUGGAGAAAAAGGGGACA | 18 | 2705 |
| CCR5-3298 | − | AGUGGAGAAAAAGGGGACA | 19 | 2706 |
| CCR5-3299 | − | GAGUGGAGAAAAAGGGGACA | 20 | 2707 |
| CCR5-3300 | − | AGAGUGGAGAAAAAGGGGACA | 21 | 2708 |
| CCR5-3301 | − | GAGAGUGGAGAAAAAGGGGACA | 22 | 2709 |
| CCR5-3302 | − | GGAGAGUGGAGAAAAAGGGGACA | 23 | 2710 |
| CCR5-3303 | − | GGGAGAGUGGAGAAAAAGGGGACA | 24 | 2711 |
| CCR5-3304 | − | UAAUCUUUAAGAUAAGGA | 18 | 2712 |
| CCR5-3305 | − | AUAAUCUUUAAGAUAAGGA | 19 | 2713 |
| CCR5-3306 | − | UAUAAUCUUUAAGAUAAGGA | 20 | 2714 |
| CCR5-3307 | − | AUAUAAUCUUUAAGAUAAGGA | 21 | 2715 |
| CCR5-3308 | − | AAUAUAAUCUUUAAGAUAAGGA | 22 | 2716 |
| CCR5-3309 | − | AAAUAUAAUCUUUAAGAUAAGGA | 23 | 2717 |
| CCR5-3310 | − | AAAAUAUAAUCUUUAAGAUAAGGA | 24 | 2718 |
| CCR5-3311 | − | AAAGGGUCACAGUUUGGA | 18 | 2719 |
| CCR5-3312 | − | GAAAGGGUCACAGUUUGGA | 19 | 2720 |
| CCR5-3313 | − | GGAAAGGGUCACAGUUUGGA | 20 | 2721 |
| CCR5-3314 | − | UUACAGAGAACAAUAAUA | 18 | 2722 |
| CCR5-3315 | − | UUUACAGAGAACAAUAAUA | 19 | 2723 |
| CCR5-3316 | − | GUUUACAGAGAACAAUAAUA | 20 | 2724 |
| CCR5-3317 | − | GGGGGUUGGGGUGGGAUA | 18 | 2725 |
| CCR5-3318 | − | UGGGGGUUGGGGUGGGAUA | 19 | 2726 |
| CCR5-2924 | − | GUGGGGGUUGGGGUGGGAUA | 20 | 2727 |
| CCR5-3319 | − | UGUGGGGGUUGGGGUGGGAUA | 21 | 2728 |
| CCR5-3320 | − | GUGUGGGGGUUGGGGUGGGAUA | 22 | 2729 |
| CCR5-3321 | − | UGUGUGGGGGUUGGGGUGGGAUA | 23 | 2730 |
| CCR5-3322 | − | CUGUGUGGGGGUUGGGGUGGGAUA | 24 | 2731 |
| CCR5-3323 | − | CAGGGUUAAUGUGAAGUC | 18 | 2732 |
| CCR5-3324 | − | ACAGGGUUAAUGUGAAGUC | 19 | 2733 |
| CCR5-3325 | − | CACAGGGUUAAUGUGAAGUC | 20 | 2734 |
| CCR5-3326 | − | GUACAAAUCAUUUGCUUC | 18 | 2735 |
| CCR5-3327 | − | UGUACAAAUCAUUUGCUUC | 19 | 2736 |
| CCR5-3328 | − | UUGUACAAAUCAUUUGCUUC | 20 | 2737 |
| CCR5-3329 | − | CUUGUACAAAUCAUUUGCUUC | 21 | 2738 |
| CCR5-3330 | − | UCUUGUACAAAUCAUUUGCUUC | 22 | 2739 |
| CCR5-3331 | − | AUCUUGUACAAAUCAUUUGCUUC | 23 | 2740 |
| CCR5-3332 | − | GAUCUUGUACAAAUCAUUUGCUUC | 24 | 2741 |
| CCR5-3333 | − | AGAAAGAUUUGCAGAGAG | 18 | 2742 |
| CCR5-3334 | − | AAGAAAGAUUUGCAGAGAG | 19 | 2743 |
| CCR5-3335 | − | AAAGAAAGAUUUGCAGAGAG | 20 | 2744 |
| CCR5-3336 | − | AAAAGAAAGAUUUGCAGAGAG | 21 | 2745 |
| CCR5-3337 | − | CAAAAGAAAGAUUUGCAGAGAG | 22 | 2746 |
| CCR5-3338 | − | UCAAAAGAAAGAUUUGCAGAGAG | 23 | 2747 |
| CCR5-3339 | − | CUCAAAAGAAAGAUUUGCAGAGAG | 24 | 2748 |
| CCR5-3340 | − | UGUUAGUUAGCUUCUGAG | 18 | 2749 |
| CCR5-3341 | − | CUGUUAGUUAGCUUCUGAG | 19 | 2750 |
| CCR5-3342 | − | CCUGUUAGUUAGCUUCUGAG | 20 | 2751 |
| CCR5-3343 | − | CUAACAGAUUCUGUGUAG | 18 | 2752 |
| CCR5-3344 | − | UCUAACAGAUUCUGUGUAG | 19 | 2753 |
| CCR5-2950 | − | UUCUAACAGAUUCUGUGUAG | 20 | 2754 |
| CCR5-3345 | − | UGGGAUAGGGGAUACGGG | 18 | 2755 |
| CCR5-3346 | − | GUGGGAUAGGGGAUACGGG | 19 | 2756 |
| CCR5-3347 | − | GGUGGGAUAGGGGAUACGGG | 20 | 2757 |
| CCR5-3348 | − | UCUGUGUGGGGGUUGGGG | 18 | 2758 |
| CCR5-3349 | − | AUCUGUGUGGGGGUUGGGG | 19 | 2759 |
| CCR5-2955 | − | CAUCUGUGUGGGGGUUGGGG | 20 | 2760 |
| CCR5-3350 | − | GCAUCUGUGUGGGGGUUGGGG | 21 | 2761 |
| CCR5-3351 | − | AGCAUCUGUGUGGGGGUUGGGG | 22 | 2762 |
| CCR5-3352 | − | GAGCAUCUGUGUGGGGGUUGGGG | 23 | 2763 |
| CCR5-3353 | − | UGAGCAUCUGUGUGGGGGUUGGGG | 24 | 2764 |
| CCR5-3354 | − | GAGCAUCUGUGUGGGGGU | 18 | 2765 |
| CCR5-3355 | − | UGAGCAUCUGUGUGGGGGU | 19 | 2766 |
| CCR5-2970 | − | GUGAGCAUCUGUGUGGGGGU | 20 | 2767 |
| CCR5-3356 | − | GGUGGUGAGCAUCUGUGU | 18 | 2768 |
| CCR5-3357 | − | GGGUGGUGAGCAUCUGUGU | 19 | 2769 |
| CCR5-2973 | − | UGGGUGGUGAGCAUCUGUGU | 20 | 2770 |
| CCR5-3358 | − | AAGAUACAAAACAUGAUU | 18 | 2771 |
| CCR5-3359 | − | AAAGAUACAAAACAUGAUU | 19 | 2772 |
| CCR5-3360 | − | CAAAGAUACAAAACAUGAUU | 20 | 2773 |
| CCR5-3361 | − | UCUCCAGUGAGAUGCCUU | 18 | 2774 |
| CCR5-3362 | − | CUCUCCAGUGAGAUGCCUU | 19 | 2775 |
| CCR5-3363 | − | CCUCUCCAGUGAGAUGCCUU | 20 | 2776 |
| CCR5-3364 | − | AAGGAAAGGGUCACAGUU | 18 | 2777 |
| CCR5-3365 | − | UAAGGAAAGGGUCACAGUU | 19 | 2778 |
| CCR5-2977 | − | AUAAGGAAAGGGUCACAGUU | 20 | 2779 |
| CCR5-3366 | − | GAUAAGGAAAGGGUCACAGUU | 21 | 2780 |
| CCR5-3367 | − | AGAUAAGGAAAGGGUCACAGUU | 22 | 2781 |
| CCR5-3368 | − | AAGAUAAGGAAAGGGUCACAGUU | 23 | 2782 |
| CCR5-3369 | − | UAAGAUAAGGAAAGGGUCACAGUU | 24 | 2783 |

[0667] Table 6C provides exemplary targeting domains for knocking down the CCR5 gene selected according to the third tier parameters. The targeting domains bind within 500 bp (e.g., upstream or downstream) of a transcription start site (TSS) and PAM is NNGRRV. It is contemplated herein that in an embodiment the targeting domain hybridizes to the target domain through complementary base pairing. Any of the targeting domains in the table can be used with a S. aureus eiCas9 molecule or eiCas9 fusion protein (e.g., an eiCas9 fused to a transcription repressor domain) to alter the CCR5 gene (e.g., reduce or eliminate CCR5 gene expression, CCR5 protein function, or the level of CCR5 protein). One or more gRNAs may be used to target an eiCas9 to the promoter region of the CCR5 gene.

TABLE 6C
3rd Tier

| gRNA | DNA | | Target Site | |
|---|---|---|---|---|
| Name | Strand | Targeting Domain | Length | SEQ ID NO |
| CCR5-4045 | + | GGGCAACAAAAUAGUGAA | 18 | 3483 |
| CCR5-4046 | + | AGGGCAACAAAAUAGUGAA | 19 | 3484 |
| CCR5-4047 | + | AAGGGCAACAAAAUAGUGAA | 20 | 3485 |
| CCR5-4048 | + | GAAGGGCAACAAAAUAGUGAA | 21 | 3486 |
| CCR5-4049 | + | UGAAGGGCAACAAAAUAGUGAA | 22 | 3487 |
| CCR5-4050 | + | UUGAAGGGCAACAAAAUAGUGAA | 23 | 3488 |
| CCR5-4051 | + | UUUGAAGGGCAACAAAAUAGUGAA | 24 | 3489 |
| CCR5-4052 | + | UUUUAAUUUUGAACCAUA | 18 | 3490 |
| CCR5-4053 | + | UUUUUAAUUUUGAACCAUA | 19 | 3491 |
| CCR5-4054 | + | AUUUUUAAUUUUGAACCAUA | 20 | 3492 |
| CCR5-4055 | + | CAUUUUUAAUUUUGAACCAUA | 21 | 3493 |
| CCR5-4056 | + | UCAUUUUUAAUUUUGAACCAUA | 22 | 3494 |
| CCR5-4057 | + | CUCAUUUUUAAUUUUGAACCAUA | 23 | 3495 |
| CCR5-4058 | + | GCUCAUUUUUAAUUUUGAACCAUA | 24 | 3496 |
| CCR5-4059 | + | AAAAUCCCCACUAAGAUC | 18 | 3497 |
| CCR5-4060 | + | GAAAAUCCCCACUAAGAUC | 19 | 3498 |
| CCR5-4061 | + | UGAAAAUCCCCACUAAGAUC | 20 | 3499 |
| CCR5-4062 | + | GUGAAAAUCCCCACUAAGAUC | 21 | 3500 |
| CCR5-4063 | + | AGUGAAAAUCCCCACUAAGAUC | 22 | 3501 |
| CCR5-4064 | + | GAGUGAAAAUCCCCACUAAGAUC | 23 | 3502 |
| CCR5-4065 | + | AGAGUGAAAAUCCCCACUAAGAUC | 24 | 3503 |
| CCR5-4066 | + | CUUCAGAUAGAUUAUAUC | 18 | 3504 |
| CCR5-4067 | + | GCUUCAGAUAGAUUAUAUC | 19 | 3505 |
| CCR5-3092 | + | AGCUUCAGAUAGAUUAUAUC | 20 | 3506 |
| CCR5-4068 | + | UAGCUUCAGAUAGAUUAUAUC | 21 | 3507 |
| CCR5-4069 | + | AUAGCUUCAGAUAGAUUAUAUC | 22 | 3508 |
| CCR5-4070 | + | CAUAGCUUCAGAUAGAUUAUAUC | 23 | 3509 |
| CCR5-4071 | + | UCAUAGCUUCAGAUAGAUUAUAUC | 24 | 3510 |
| CCR5-4072 | + | GAGGGCAUCUUGUGGCUC | 18 | 3511 |
| CCR5-4073 | + | AGAGGGCAUCUUGUGGCUC | 19 | 3512 |
| CCR5-3095 | + | CAGAGGGCAUCUUGUGGCUC | 20 | 3513 |
| CCR5-4074 | + | CCAGAGGGCAUCUUGUGGCUC | 21 | 3514 |
| CCR5-4075 | + | CCCAGAGGGCAUCUUGUGGCUC | 22 | 3515 |
| CCR5-4076 | + | GCCCAGAGGGCAUCUUGUGGCUC | 23 | 3516 |
| CCR5-4077 | + | AGCCCAGAGGGCAUCUUGUGGCUC | 24 | 3517 |
| CCR5-4078 | + | UUUCGUCUGCCACCACAG | 18 | 3518 |
| CCR5-4079 | + | GUUUCGUCUGCCACCACAG | 19 | 3519 |
| CCR5-4080 | + | UGUUUCGUCUGCCACCACAG | 20 | 3520 |
| CCR5-4081 | + | AUGUUUCGUCUGCCACCACAG | 21 | 3521 |
| CCR5-4082 | + | AAUGUUUCGUCUGCCACCACAG | 22 | 3522 |
| CCR5-4083 | + | AAAUGUUUCGUCUGCCACCACAG | 23 | 3523 |
| CCR5-4084 | + | AAAAUGUUUCGUCUGCCACCACAG | 24 | 3524 |
| CCR5-4085 | + | UAGAUUAUAUCUGGAGUG | 18 | 3525 |
| CCR5-4086 | + | AUAGAUUAUAUCUGGAGUG | 19 | 3526 |
| CCR5-4087 | + | GAUAGAUUAUAUCUGGAGUG | 20 | 3527 |
| CCR5-4088 | + | AGAUAGAUUAUAUCUGGAGUG | 21 | 3528 |
| CCR5-4089 | + | CAGAUAGAUUAUAUCUGGAGUG | 22 | 3529 |
| CCR5-4090 | + | UCAGAUAGAUUAUAUCUGGAGUG | 23 | 3530 |
| CCR5-4091 | + | UUCAGAUAGAUUAUAUCUGGAGUG | 24 | 3531 |
| CCR5-4092 | + | UUUCUCUUAUUAAACCCU | 18 | 3532 |
| CCR5-4093 | + | UUUUCUCUUAUUAAACCCU | 19 | 3533 |
| CCR5-4094 | + | AUUUUCUCUUAUUAAACCCU | 20 | 3534 |
| CCR5-4095 | + | AAUUUUCUCUUAUUAAACCCU | 21 | 3535 |
| CCR5-4096 | + | GAAUUUUCUCUUAUUAAACCCU | 22 | 3536 |
| CCR5-4097 | + | AGAAUUUUCUCUUAUUAAACCCU | 23 | 3537 |
| CCR5-4098 | + | GAGAAUUUUCUCUUAUUAAACCCU | 24 | 3538 |
| CCR5-4099 | + | AGUUCAGCUGCUCUAGCU | 18 | 3539 |
| CCR5-4100 | + | AAGUUCAGCUGCUCUAGCU | 19 | 3540 |
| CCR5-4101 | + | UAAGUUCAGCUGCUCUAGCU | 20 | 3541 |
| CCR5-4102 | + | UUAAGUUCAGCUGCUCUAGCU | 21 | 3542 |
| CCR5-4103 | + | UUUAAGUUCAGCUGCUCUAGCU | 22 | 3543 |
| CCR5-4104 | + | AUUUAAGUUCAGCUGCUCUAGCU | 23 | 3544 |
| CCR5-4105 | + | UAUUUAAGUUCAGCUGCUCUAGCU | 24 | 3545 |
| CCR5-4106 | + | CUAUGUAUCUGGCAUAGU | 18 | 3546 |
| CCR5-4107 | + | CCUAUGUAUCUGGCAUAGU | 19 | 3547 |
| CCR5-4108 | + | ACCUAUGUAUCUGGCAUAGU | 20 | 3548 |
| CCR5-4109 | + | CACCUAUGUAUCUGGCAUAGU | 21 | 3549 |
| CCR5-4110 | + | CCACCUAUGUAUCUGGCAUAGU | 22 | 3550 |
| CCR5-4111 | + | GCCACCUAUGUAUCUGGCAUAGU | 23 | 3551 |
| CCR5-4112 | + | UGCCACCUAUGUAUCUGGCAUAGU | 24 | 3552 |
| CCR5-4113 | + | UUCUGAGUUGCCACAAUU | 18 | 3553 |
| CCR5-4114 | + | UUUCUGAGUUGCCACAAUU | 19 | 3554 |
| CCR5-4115 | + | GUUUCUGAGUUGCCACAAUU | 20 | 3555 |
| CCR5-4116 | + | AGUUUCUGAGUUGCCACAAUU | 21 | 3556 |
| CCR5-4117 | + | UAGUUUCUGAGUUGCCACAAUU | 22 | 3557 |
| CCR5-4118 | + | GUAGUUUCUGAGUUGCCACAAUU | 23 | 3558 |
| CCR5-4119 | + | UGUAGUUUCUGAGUUGCCACAAUU | 24 | 3559 |
| CCR5-4120 | + | AGAUGAAUGUCAUGCAUU | 18 | 3560 |
| CCR5-4121 | + | CAGAUGAAUGUCAUGCAUU | 19 | 3561 |
| CCR5-4122 | + | ACAGAUGAAUGUCAUGCAUU | 20 | 3562 |
| CCR5-4123 | + | CACAGAUGAAUGUCAUGCAUU | 21 | 3563 |
| CCR5-4124 | + | CCACAGAUGAAUGUCAUGCAUU | 22 | 3564 |
| CCR5-4125 | + | ACCACAGAUGAAUGUCAUGCAUU | 23 | 3565 |
| CCR5-4126 | + | CACCACAGAUGAAUGUCAUGCAUU | 24 | 3566 |
| CCR5-4127 | + | GCACGUAAUUUUGCUGUU | 18 | 3567 |
| CCR5-4128 | + | GGCACGUAAUUUUGCUGUU | 19 | 3568 |
| CCR5-3141 | + | GGGCACGUAAUUUUGCUGUU | 20 | 3569 |
| CCR5-4129 | + | GGGGCACGUAAUUUUGCUGUU | 21 | 3570 |
| CCR5-4130 | + | GGGGGCACGUAAUUUUGCUGUU | 22 | 3571 |
| CCR5-4131 | + | UGGGGGCACGUAAUUUUGCUGUU | 23 | 3572 |
| CCR5-4132 | + | UUGGGGGCACGUAAUUUUGCUGUU | 24 | 3573 |
| CCR5-4133 | + | AGUUUGUGUUUGUAGUUU | 18 | 3574 |
| CCR5-4134 | + | AAGUUUGUGUUUGUAGUUU | 19 | 3575 |
| CCR5-4135 | + | GAAGUUUGUGUUUGUAGUUU | 20 | 3576 |
| CCR5-4136 | + | UGAAGUUUGUGUUUGUAGUUU | 21 | 3577 |
| CCR5-4137 | + | GUGAAGUUUGUGUUUGUAGUUU | 22 | 3578 |
| CCR5-4138 | + | UGUGAAGUUUGUGUUUGUAGUUU | 23 | 3579 |
| CCR5-4139 | + | CUGUGAAGUUUGUGUUUGUAGUUU | 24 | 3580 |
| CCR5-4140 | − | UGCCUAGUCUAAGGUGCA | 18 | 3581 |
| CCR5-4141 | − | CUGCCUAGUCUAAGGUGCA | 19 | 3582 |
| CCR5-3067 | − | GCUGCCUAGUCUAAGGUGCA | 20 | 3583 |
| CCR5-4142 | − | AGCUGCCUAGUCUAAGGUGCA | 21 | 3584 |
| CCR5-4143 | − | CAGCUGCCUAGUCUAAGGUGCA | 22 | 3585 |
| CCR5-4144 | − | UCAGCUGCCUAGUCUAAGGUGCA | 23 | 3586 |
| CCR5-4145 | − | CUCAGCUGCCUAGUCUAAGGUGCA | 24 | 3587 |
| CCR5-4146 | − | CAGGGAGUUUGAGACUCA | 18 | 3588 |
| CCR5-4147 | − | GCAGGGAGUUUGAGACUCA | 19 | 3589 |
| CCR5-4148 | − | UGCAGGGAGUUUGAGACUCA | 20 | 3590 |
| CCR5-4149 | − | GUGCAGGGAGUUUGAGACUCA | 21 | 3591 |
| CCR5-4150 | − | GGUGCAGGGAGUUUGAGACUCA | 22 | 3592 |
| CCR5-4151 | − | AGGUGCAGGGAGUUUGAGACUCA | 23 | 3593 |
| CCR5-4152 | − | AAGGUGCAGGGAGUUUGAGACUCA | 24 | 3594 |
| CCR5-4153 | − | CCCAUCUUUUUCUGGACC | 18 | 3595 |
| CCR5-4154 | − | UCCCAUCUUUUUCUGGACC | 19 | 3596 |
| CCR5-4155 | − | UUCCCAUCUUUUUCUGGACC | 20 | 3597 |
| CCR5-4156 | − | UUUCCCAUCUUUUUCUGGACC | 21 | 3598 |
| CCR5-4157 | − | GUUUCCCAUCUUUUUCUGGACC | 22 | 3599 |
| CCR5-4158 | − | GGUUUCCCAUCUUUUUCUGGACC | 23 | 3600 |
| CCR5-4159 | − | AGGUUUCCCAUCUUUUUCUGGACC | 24 | 3601 |
| CCR5-4160 | − | UUAUAAGACUAAACUACC | 18 | 3602 |
| CCR5-4161 | − | GUUAUAAGACUAAACUACC | 19 | 3603 |
| CCR5-4162 | − | GGUUAUAAGACUAAACUACC | 20 | 3604 |
| CCR5-4163 | − | UGGUUAUAAGACUAAACUACC | 21 | 3605 |
| CCR5-4164 | − | CUGGUUAUAAGACUAAACUACC | 22 | 3606 |
| CCR5-4165 | − | GCUGGUUAUAAGACUAAACUACC | 23 | 3607 |
| CCR5-4166 | − | AGCUGGUUAUAAGACUAAACUACC | 24 | 3608 |
| CCR5-4167 | − | AGUUUUAACUAUGGGCUC | 18 | 3609 |
| CCR5-4168 | − | GAGUUUUAACUAUGGGCUC | 19 | 3610 |
| CCR5-4169 | − | AGAGUUUUAACUAUGGGCUC | 20 | 3611 |
| CCR5-4170 | − | AAGAGUUUUAACUAUGGGCUC | 21 | 3612 |
| CCR5-4171 | − | AAAGAGUUUUAACUAUGGGCUC | 22 | 3613 |
| CCR5-4172 | − | UAAAGAGUUUUAACUAUGGGCUC | 23 | 3614 |
| CCR5-4173 | − | CUAAAGAGUUUUAACUAUGGGCUC | 24 | 3615 |
| CCR5-4174 | − | CUUCCGUGACCUUGGCUC | 18 | 3616 |
| CCR5-4175 | − | GCUUCCGUGACCUUGGCUC | 19 | 3617 |
| CCR5-4176 | − | GGCUUCCGUGACCUUGGCUC | 20 | 3618 |
| CCR5-4177 | − | GGGCUUCCGUGACCUUGGCUC | 21 | 3619 |
| CCR5-4178 | − | UGGGCUUCCGUGACCUUGGCUC | 22 | 3620 |
| CCR5-4179 | − | CUGGGCUUCCGUGACCUUGGCUC | 23 | 3621 |
| CCR5-4180 | − | UCUGGGCUUCCGUGACCUUGGCUC | 24 | 3622 |
| CCR5-4181 | − | UUUUUAUUAUAUUAUUUC | 18 | 3623 |
| CCR5-4182 | − | UUUUUUAUUAUAUUAUUUC | 19 | 3624 |
| CCR5-4183 | − | AUUUUUUAUUAUAUUAUUUC | 20 | 3625 |
| CCR5-4184 | − | CAUUUUUUAUUAUAUUAUUUC | 21 | 3626 |
| CCR5-4185 | − | ACAUUUUUUAUUAUAUUAUUUC | 22 | 3627 |
| CCR5-4186 | − | AACAUUUUUUAUUAUAUUAUUUC | 23 | 3628 |
| CCR5-4187 | − | AAACAUUUUUUAUUAUAUUAUUUC | 24 | 3629 |
| CCR5-4188 | − | UGCCAGAUACAUAGGUGG | 18 | 3630 |
| CCR5-4189 | − | AUGCCAGAUACAUAGGUGG | 19 | 3631 |
| CCR5-4190 | − | UAUGCCAGAUACAUAGGUGG | 20 | 3632 |
| CCR5-4191 | − | CUAUGCCAGAUACAUAGGUGG | 21 | 3633 |
| CCR5-4192 | − | ACUAUGCCAGAUACAUAGGUGG | 22 | 3634 |
| CCR5-4193 | − | CACUAUGCCAGAUACAUAGGUGG | 23 | 3635 |
| CCR5-4194 | − | ACACUAUGCCAGAUACAUAGGUGG | 24 | 3636 |
| CCR5-4195 | − | UGGACCCAGGAUCUUAGU | 18 | 3637 |
| CCR5-4196 | − | CUGGACCCAGGAUCUUAGU | 19 | 3638 |
| CCR5-3135 | − | UCUGGACCCAGGAUCUUAGU | 20 | 3639 |
| CCR5-4197 | − | UUCUGGACCCAGGAUCUUAGU | 21 | 3640 |
| CCR5-4198 | − | UUUCUGGACCCAGGAUCUUAGU | 22 | 3641 |
| CCR5-4199 | − | UUUUCUGGACCCAGGAUCUUAGU | 23 | 3642 |
| CCR5-4200 | − | UUUUUCUGGACCCAGGAUCUUAGU | 24 | 3643 |
| CCR5-4201 | − | AAACUUCACAGAAAAUGU | 18 | 3644 |
| CCR5-4202 | − | CAAACUUCACAGAAAAUGU | 19 | 3645 |
| CCR5-4203 | − | ACAAACUUCACAGAAAAUGU | 20 | 3646 |
| CCR5-4204 | − | CACAAACUUCACAGAAAAUGU | 21 | 3647 |
| CCR5-4205 | − | ACACAAACUUCACAGAAAAUGU | 22 | 3648 |
| CCR5-4206 | − | AACACAAACUUCACAGAAAAUGU | 23 | 3649 |
| CCR5-4207 | − | AAACACAAACUUCACAGAAAAUGU | 24 | 3650 |

[0668] Table 6D provides exemplary targeting domains for knocking down the CCR5 gene selected according to the fourth tier parameters. Within the additional 500 bp (e.g., upstream or downstream) of a transcription start site (TSS), e.g., extending to 1 kb upstream and downstream of a TSS and PAM is NNGRRT. It is contemplated herein that in an embodiment the targeting domain hybridizes to the target domain through complementary base pairing. Any of the targeting domains in the table can be used with a S. aureus eiCas9 molecule or eiCas9 fusion protein (e.g., an eiCas9 fused to a transcription repressor domain) to alter the CCR5 gene (e.g., reduce or eliminate CCR5 gene expression, CCR5 protein function, or the level of CCR5 protein). One or more gRNAs may be used to target an eiCas9 to the promoter region of the CCR5 gene.

TABLE 6D
4th Tier

| gRNA | DNA | | Target Site | |
|---|---|---|---|---|
| Name | Strand | Targeting Domain | Length | SEQ ID NO |
| CCR5-3370 | + | AAGCCCACAUUUUAGUAA | 18 | 2784 |
| CCR5-3371 | + | AAAGCCCACAUUUUAGUAA | 19 | 2785 |
| CCR5-3372 | + | AAAAGCCCACAUUUUAGUAA | 20 | 2786 |
| CCR5-3373 | + | CAAAAGCCCACAUUUUAGUAA | 21 | 2787 |
| CCR5-3374 | + | UCAAAAGCCCACAUUUUAGUAA | 22 | 2788 |
| CCR5-3375 | + | GUCAAAAGCCCACAUUUUAGUAA | 23 | 2789 |
| CCR5-3376 | + | AGUCAAAAGCCCACAUUUUAGUAA | 24 | 2790 |
| CCR5-3377 | + | UGAAGGCGAAAAGAAUCA | 18 | 2791 |
| CCR5-3378 | + | UUGAAGGCGAAAAGAAUCA | 19 | 2792 |
| CCR5-3379 | + | AUUGAAGGCGAAAAGAAUCA | 20 | 2793 |
| CCR5-3380 | + | UAUUGAAGGCGAAAAGAAUCA | 21 | 2794 |
| CCR5-3381 | + | GUAUUGAAGGCGAAAAGAAUCA | 22 | 2795 |
| CCR5-3382 | + | UGUAUUGAAGGCGAAAAGAAUCA | 23 | 2796 |
| CCR5-3383 | + | GUGUAUUGAAGGCGAAAAGAAUCA | 24 | 2797 |
| CCR5-3384 | + | AUGAUUUGUACAAGAUCA | 18 | 2798 |
| CCR5-3385 | + | AAUGAUUUGUACAAGAUCA | 19 | 2799 |
| CCR5-3386 | + | AAAUGAUUUGUACAAGAUCA | 20 | 2800 |
| CCR5-3387 | + | CAAAUGAUUUGUACAAGAUCA | 21 | 2801 |
| CCR5-3388 | + | GCAAAUGAUUUGUACAAGAUCA | 22 | 2802 |
| CCR5-3389 | + | AGCAAAUGAUUUGUACAAGAUCA | 23 | 2803 |
| CCR5-3390 | + | AAGCAAAUGAUUUGUACAAGAUCA | 24 | 2804 |
| CCR5-3391 | + | UAUUCAGAAGGCAUCUCA | 18 | 2805 |
| CCR5-3392 | + | AUAUUCAGAAGGCAUCUCA | 19 | 2806 |
| CCR5-3393 | + | CAUAUUCAGAAGGCAUCUCA | 20 | 2807 |
| CCR5-3394 | + | ACCAACUUUAAAUGUAGA | 18 | 2808 |
| CCR5-3395 | + | AACCAACUUUAAAUGUAGA | 19 | 2809 |
| CCR5-2918 | + | AAACCAACUUUAAAUGUAGA | 20 | 2810 |
| CCR5-3396 | + | UAAACCAACUUUAAAUGUAGA | 21 | 2811 |
| CCR5-3397 | + | UUAAACCAACUUUAAAUGUAGA | 22 | 2812 |
| CCR5-3398 | + | CUUAAACCAACUUUAAAUGUAGA | 23 | 2813 |
| CCR5-3399 | + | ACUUAAACCAACUUUAAAUGUAGA | 24 | 2814 |
| CCR5-3400 | + | AAAUGCUGUUUCUUUUGA | 18 | 2815 |
| CCR5-3401 | + | GAAAUGCUGUUUCUUUUGA | 19 | 2816 |
| CCR5-2921 | + | GGAAAUGCUGUUUCUUUUGA | 20 | 2817 |
| CCR5-3402 | + | AGGAAAUGCUGUUUCUUUUGA | 21 | 2818 |
| CCR5-3403 | + | UAGGAAAUGCUGUUUCUUUUGA | 22 | 2819 |
| CCR5-3404 | + | GUAGGAAAUGCUGUUUCUUUUGA | 23 | 2820 |
| CCR5-3405 | + | AGUAGGAAAUGCUGUUUCUUUUGA | 24 | 2821 |
| CCR5-3406 | + | AAACCAACUUUAAAUGUA | 18 | 2822 |
| CCR5-3407 | + | UAAACCAACUUUAAAUGUA | 19 | 2823 |
| CCR5-3408 | + | UUAAACCAACUUUAAAUGUA | 20 | 2824 |
| CCR5-3409 | + | CUUAAACCAACUUUAAAUGUA | 21 | 2825 |
| CCR5-3410 | + | ACUUAAACCAACUUUAAAUGUA | 22 | 2826 |
| CCR5-3411 | + | AACUUAAACCAACUUUAAAUGUA | 23 | 2827 |
| CCR5-3412 | + | CAACUUAAACCAACUUUAAAUGUA | 24 | 2828 |
| CCR5-3413 | + | GUUAAAUCAUUAAGUGUA | 18 | 2829 |
| CCR5-3414 | + | AGUUAAAUCAUUAAGUGUA | 19 | 2830 |
| CCR5-3415 | + | GAGUUAAAUCAUUAAGUGUA | 20 | 2831 |
| CCR5-3416 | + | GGAGUUAAAUCAUUAAGUGUA | 21 | 2832 |
| CCR5-3417 | + | UGGAGUUAAAUCAUUAAGUGUA | 22 | 2833 |
| CCR5-3418 | + | GUGGAGUUAAAUCAUUAAGUGUA | 23 | 2834 |
| CCR5-3419 | + | GGUGGAGUUAAAUCAUUAAGUGUA | 24 | 2835 |
| CCR5-3420 | + | CGGGGAGAGUUUCUUGUA | 18 | 2836 |
| CCR5-3421 | + | CCGGGGAGAGUUUCUUGUA | 19 | 2837 |
| CCR5-2929 | + | ACCGGGGAGAGUUUCUUGUA | 20 | 2838 |
| CCR5-3422 | + | UACCGGGGAGAGUUUCUUGUA | 21 | 2839 |
| CCR5-3423 | + | UUACCGGGGAGAGUUUCUUGUA | 22 | 2840 |
| CCR5-3424 | + | CUUACCGGGGAGAGUUUCUUGUA | 23 | 2841 |
| CCR5-3425 | + | ACUUACCGGGGAGAGUUUCUUGUA | 24 | 2842 |
| CCR5-3426 | + | CAGCUGAGAGGUUACUUA | 18 | 2843 |
| CCR5-3427 | + | GCAGCUGAGAGGUUACUUA | 19 | 2844 |
| CCR5-3428 | + | AGCAGCUGAGAGGUUACUUA | 20 | 2845 |
| CCR5-3429 | + | AAGCAGCUGAGAGGUUACUUA | 21 | 2846 |
| CCR5-3430 | + | CAAGCAGCUGAGAGGUUACUUA | 22 | 2847 |
| CCR5-3431 | + | CCAAGCAGCUGAGAGGUUACUUA | 23 | 2848 |
| CCR5-3432 | + | GCCAAGCAGCUGAGAGGUUACUUA | 24 | 2849 |
| CCR5-3433 | + | AUUCAGAAGGCAUCUCAC | 18 | 2850 |
| CCR5-3434 | + | UAUUCAGAAGGCAUCUCAC | 19 | 2851 |
| CCR5-2932 | + | AUAUUCAGAAGGCAUCUCAC | 20 | 2852 |
| CCR5-3435 | + | AGCUGAGAGGUUACUUAC | 18 | 2853 |
| CCR5-3436 | + | CAGCUGAGAGGUUACUUAC | 19 | 2854 |
| CCR5-2935 | + | GCAGCUGAGAGGUUACUUAC | 20 | 2855 |
| CCR5-3437 | + | AGCAGCUGAGAGGUUACUUAC | 21 | 2856 |
| CCR5-3438 | + | AAGCAGCUGAGAGGUUACUUAC | 22 | 2857 |
| CCR5-3439 | + | CAAGCAGCUGAGAGGUUACUUAC | 23 | 2858 |
| CCR5-3440 | + | CCAAGCAGCUGAGAGGUUACUUAC | 24 | 2859 |
| CCR5-3441 | + | GCUGAGAGGUUACUUACC | 18 | 2860 |
| CCR5-3442 | + | AGCUGAGAGGUUACUUACC | 19 | 2861 |
| CCR5-2937 | + | CAGCUGAGAGGUUACUUACC | 20 | 2862 |
| CCR5-3443 | + | GCAGCUGAGAGGUUACUUACC | 21 | 2863 |
| CCR5-3444 | + | AGCAGCUGAGAGGUUACUUACC | 22 | 2864 |
| CCR5-3445 | + | AAGCAGCUGAGAGGUUACUUACC | 23 | 2865 |
| CCR5-3446 | + | CAAGCAGCUGAGAGGUUACUUACC | 24 | 2866 |
| CCR5-3447 | + | UAAAAGAAAUUACUAUCC | 18 | 2867 |
| CCR5-3448 | + | GUAAAAGAAAUUACUAUCC | 19 | 2868 |
| CCR5-3449 | + | AGUAAAAGAAAUUACUAUCC | 20 | 2869 |
| CCR5-3450 | + | UAGUAAAAGAAAUUACUAUCC | 21 | 2870 |
| CCR5-3451 | + | UUAGUAAAAGAAAUUACUAUCC | 22 | 2871 |
| CCR5-3452 | + | UUUAGUAAAAGAAAUUACUAUCC | 23 | 2872 |
| CCR5-3453 | + | UUUUAGUAAAAGAAAUUACUAUCC | 24 | 2873 |
| CCR5-3454 | + | GUUGAGCUUAAAAUAAGC | 18 | 2874 |
| CCR5-3455 | + | AGUUGAGCUUAAAAUAAGC | 19 | 2875 |
| CCR5-3456 | + | AAGUUGAGCUUAAAAUAAGC | 20 | 2876 |
| CCR5-3457 | + | UAAGUUGAGCUUAAAAUAAGC | 21 | 2877 |
| CCR5-3458 | + | UUAAGUUGAGCUUAAAAUAAGC | 22 | 2878 |
| CCR5-3459 | + | UUUAAGUUGAGCUUAAAAUAAGC | 23 | 2879 |
| CCR5-3460 | + | UUUUAAGUUGAGCUUAAAAUAAGC | 24 | 2880 |
| CCR5-3461 | + | AAUAAAGGAUAUCAGAGC | 18 | 2881 |
| CCR5-3462 | + | GAAUAAAGGAUAUCAGAGC | 19 | 2882 |
| CCR5-3463 | + | AGAAUAAAGGAUAUCAGAGC | 20 | 2883 |
| CCR5-3464 | + | AAGAAUAAAGGAUAUCAGAGC | 21 | 2884 |
| CCR5-3465 | + | AAAGAAUAAAGGAUAUCAGAGC | 22 | 2885 |
| CCR5-3466 | + | UAAAGAAUAAAGGAUAUCAGAGC | 23 | 2886 |
| CCR5-3467 | + | AUAAAGAAUAAAGGAUAUCAGAGC | 24 | 2887 |
| CCR5-3468 | + | UAAAUGUAGAGGGGGAUC | 18 | 2888 |
| CCR5-3469 | + | UUAAAUGUAGAGGGGGAUC | 19 | 2889 |
| CCR5-3470 | + | UUUAAAUGUAGAGGGGGAUC | 20 | 2890 |
| CCR5-3471 | + | CUUUAAAUGUAGAGGGGGAUC | 21 | 2891 |
| CCR5-3472 | + | ACUUUAAAUGUAGAGGGGGAUC | 22 | 2892 |
| CCR5-3473 | + | AACUUUAAAUGUAGAGGGGGAUC | 23 | 2893 |
| CCR5-3474 | + | CAACUUUAAAUGUAGAGGGGGAUC | 24 | 2894 |
| CCR5-3475 | + | AUAUAGACAGUAUAAAAG | 18 | 2895 |
| CCR5-3476 | + | CAUAUAGACAGUAUAAAAG | 19 | 2896 |
| CCR5-3477 | + | UCAUAUAGACAGUAUAAAAG | 20 | 2897 |
| CCR5-3478 | + | AUCAUAUAGACAGUAUAAAAG | 21 | 2898 |
| CCR5-3479 | + | AAUCAUAUAGACAGUAUAAAAG | 22 | 2899 |
| CCR5-3480 | + | CAAUCAUAUAGACAGUAUAAAAG | 23 | 2900 |
| CCR5-3481 | + | UCAAUCAUAUAGACAGUAUAAAAG | 24 | 2901 |
| CCR5-3482 | + | UCAUUAAGUGUAUUGAAG | 18 | 2902 |
| CCR5-3483 | + | AUCAUUAAGUGUAUUGAAG | 19 | 2903 |
| CCR5-3484 | + | AAUCAUUAAGUGUAUUGAAG | 20 | 2904 |
| CCR5-3485 | + | AAAUCAUUAAGUGUAUUGAAG | 21 | 2905 |
| CCR5-3486 | + | UAAAUCAUUAAGUGUAUUGAAG | 22 | 2906 |
| CCR5-3487 | + | UUAAAUCAUUAAGUGUAUUGAAG | 23 | 2907 |
| CCR5-3488 | + | GUUAAAUCAUUAAGUGUAUUGAAG | 24 | 2908 |
| CCR5-3489 | + | ACAGUUCUUCUUUUUAAG | 18 | 2909 |
| CCR5-3490 | + | AACAGUUCUUCUUUUUAAG | 19 | 2910 |
| CCR5-3491 | + | GAACAGUUCUUCUUUUUAAG | 20 | 2911 |
| CCR5-3492 | + | AGAACAGUUCUUCUUUUUAAG | 21 | 2912 |
| CCR5-3493 | + | GAGAACAGUUCUUCUUUUUAAG | 22 | 2913 |
| CCR5-3494 | + | AGAGAACAGUUCUUCUUUUUAAG | 23 | 2914 |
| CCR5-3495 | + | CAGAGAACAGUUCUUCUUUUUAAG | 24 | 2915 |
| CCR5-3496 | + | CUCAGCUCUUCUGGCCAG | 18 | 2916 |
| CCR5-3497 | + | UCUCAGCUCUUCUGGCCAG | 19 | 2917 |
| CCR5-3498 | + | GUCUCAGCUCUUCUGGCCAG | 20 | 2918 |
| CCR5-3499 | + | UGUCUCAGCUCUUCUGGCCAG | 21 | 2919 |
| CCR5-3500 | + | AUGUCUCAGCUCUUCUGGCCAG | 22 | 2920 |
| CCR5-3501 | + | GAUGUCUCAGCUCUUCUGGCCAG | 23 | 2921 |
| CCR5-3502 | + | GGAUGUCUCAGCUCUUCUGGCCAG | 24 | 2922 |
| CCR5-3503 | + | AACUAACAGGCCAAGCAG | 18 | 2923 |
| CCR5-3504 | + | UAACUAACAGGCCAAGCAG | 19 | 2924 |
| CCR5-3505 | + | CUAACUAACAGGCCAAGCAG | 20 | 2925 |
| CCR5-3506 | + | GCUAACUAACAGGCCAAGCAG | 21 | 2926 |
| CCR5-3507 | + | AGCUAACUAACAGGCCAAGCAG | 22 | 2927 |
| CCR5-3508 | + | AAGCUAACUAACAGGCCAAGCAG | 23 | 2928 |
| CCR5-3509 | + | GAAGCUAACUAACAGGCCAAGCAG | 24 | 2929 |
| CCR5-3510 | + | AAAGGAUAUCAGAGCUAG | 18 | 2930 |
| CCR5-3511 | + | UAAAGGAUAUCAGAGCUAG | 19 | 2931 |
| CCR5-3512 | + | AUAAAGGAUAUCAGAGCUAG | 20 | 2932 |
| CCR5-3513 | + | AAUAAAGGAUAUCAGAGCUAG | 21 | 2933 |
| CCR5-3514 | + | GAAUAAAGGAUAUCAGAGCUAG | 22 | 2934 |
| CCR5-3515 | + | AGAAUAAAGGAUAUCAGAGCUAG | 23 | 2935 |
| CCR5-3516 | + | AAGAAUAAAGGAUAUCAGAGCUAG | 24 | 2936 |
| CCR5-3517 | + | AACCAACUUUAAAUGUAG | 18 | 2937 |
| CCR5-3518 | + | AAACCAACUUUAAAUGUAG | 19 | 2938 |
| CCR5-2949 | + | UAAACCAACUUUAAAUGUAG | 20 | 2939 |
| CCR5-3519 | + | UUAAACCAACUUUAAAUGUAG | 21 | 2940 |
| CCR5-3520 | + | CUUAAACCAACUUUAAAUGUAG | 22 | 2941 |
| CCR5-3521 | + | ACUUAAACCAACUUUAAAUGUAG | 23 | 2942 |
| CCR5-3522 | + | AACUUAAACCAACUUUAAAUGUAG | 24 | 2943 |
| CCR5-3523 | + | GGGGAGAGUUUCUUGUAG | 18 | 2944 |
| CCR5-3524 | + | CGGGGAGAGUUUCUUGUAG | 19 | 2945 |
| CCR5-2820 | + | CCGGGGAGAGUUUCUUGUAG | 20 | 2946 |
| CCR5-3525 | + | ACCGGGGAGAGUUUCUUGUAG | 21 | 2947 |
| CCR5-3526 | + | UACCGGGGAGAGUUUCUUGUAG | 22 | 2948 |
| CCR5-3527 | + | UUACCGGGGAGAGUUUCUUGUAG | 23 | 2949 |
| CCR5-3528 | + | CUUACCGGGGAGAGUUUCUUGUAG | 24 | 2950 |
| CCR5-3529 | + | GGGUUUAGUUCUCCUUAG | 18 | 2951 |
| CCR5-3530 | + | AGGGUUUAGUUCUCCUUAG | 19 | 2952 |
| CCR5-3531 | + | GAGGGUUUAGUUCUCCUUAG | 20 | 2953 |
| CCR5-3532 | + | AGAGGGUUUAGUUCUCCUUAG | 21 | 2954 |
| CCR5-3533 | + | GAGAGGGUUUAGUUCUCCUUAG | 22 | 2955 |
| CCR5-3534 | + | GGAGAGGGUUUAGUUCUCCUUAG | 23 | 2956 |
| CCR5-3535 | + | UGGAGAGGGUUUAGUUCUCCUUAG | 24 | 2957 |
| CCR5-3536 | + | CUGAGAGGUUACUUACCG | 18 | 2958 |
| CCR5-3537 | + | GCUGAGAGGUUACUUACCG | 19 | 2959 |
| CCR5-2821 | + | AGCUGAGAGGUUACUUACCG | 20 | 2960 |
| CCR5-3538 | + | CAGCUGAGAGGUUACUUACCG | 21 | 2961 |
| CCR5-3539 | + | GCAGCUGAGAGGUUACUUACCG | 22 | 2962 |
| CCR5-3540 | + | AGCAGCUGAGAGGUUACUUACCG | 23 | 2963 |
| CCR5-3541 | + | AAGCAGCUGAGAGGUUACUUACCG | 24 | 2964 |
| CCR5-3542 | + | UGUUUCUUUUGAAGGAGG | 18 | 2965 |
| CCR5-3543 | + | CUGUUUCUUUUGAAGGAGG | 19 | 2966 |
| CCR5-3544 | + | GCUGUUUCUUUUGAAGGAGG | 20 | 2967 |
| CCR5-3545 | + | UGCUGUUUCUUUUGAAGGAGG | 21 | 2968 |
| CCR5-3546 | + | AUGCUGUUUCUUUUGAAGGAGG | 22 | 2969 |
| CCR5-3547 | + | AAUGCUGUUUCUUUUGAAGGAGG | 23 | 2970 |
| CCR5-3548 | + | AAAUGCUGUUUCUUUUGAAGGAGG | 24 | 2971 |
| CCR5-3549 | + | UUAAACCAACUUUAAAUG | 18 | 2972 |
| CCR5-3550 | + | CUUAAACCAACUUUAAAUG | 19 | 2973 |
| CCR5-3551 | + | ACUUAAACCAACUUUAAAUG | 20 | 2974 |
| CCR5-3552 | + | AACUUAAACCAACUUUAAAUG | 21 | 2975 |
| CCR5-3553 | + | CAACUUAAACCAACUUUAAAUG | 22 | 2976 |
| CCR5-3554 | + | CCAACUUAAACCAACUUUAAAUG | 23 | 2977 |
| CCR5-3555 | + | GCCAACUUAAACCAACUUUAAAUG | 24 | 2978 |
| CCR5-3556 | + | UCAGAAGGCAUCUCACUG | 18 | 2979 |
| CCR5-3557 | + | UUCAGAAGGCAUCUCACUG | 19 | 2980 |
| CCR5-3558 | + | AUUCAGAAGGCAUCUCACUG | 20 | 2981 |
| CCR5-3559 | + | UAUUCAGAAGGCAUCUCACUG | 21 | 2982 |
| CCR5-3560 | + | AUAUUCAGAAGGCAUCUCACUG | 22 | 2983 |
| CCR5-3561 | + | CAUAUUCAGAAGGCAUCUCACUG | 23 | 2984 |
| CCR5-3562 | + | ACAUAUUCAGAAGGCAUCUCACUG | 24 | 2985 |
| CCR5-3563 | + | ACCGGGGAGAGUUUCUUG | 18 | 2986 |
| CCR5-3564 | + | UACCGGGGAGAGUUUCUUG | 19 | 2987 |
| CCR5-3565 | + | UUACCGGGGAGAGUUUCUUG | 20 | 2988 |
| CCR5-3566 | + | CUUACCGGGGAGAGUUUCUUG | 21 | 2989 |
| CCR5-3567 | + | ACUUACCGGGGAGAGUUUCUUG | 22 | 2990 |
| CCR5-3568 | + | UACUUACCGGGGAGAGUUUCUUG | 23 | 2991 |
| CCR5-3569 | + | UUACUUACCGGGGAGAGUUUCUUG | 24 | 2992 |
| CCR5-3570 | + | GAAAUGCUGUUUCUUUUG | 18 | 2993 |
| CCR5-3571 | + | GGAAAUGCUGUUUCUUUUG | 19 | 2994 |
| CCR5-3572 | + | AGGAAAUGCUGUUUCUUUUG | 20 | 2995 |
| CCR5-3573 | + | UAGGAAAUGCUGUUUCUUUUG | 21 | 2996 |
| CCR5-3574 | + | GUAGGAAAUGCUGUUUCUUUUG | 22 | 2997 |
| CCR5-3575 | + | AGUAGGAAAUGCUGUUUCUUUUG | 23 | 2998 |
| CCR5-3576 | + | AAGUAGGAAAUGCUGUUUCUUUUG | 24 | 2999 |
| CCR5-3577 | + | AUUGAAGGCGAAAAGAAU | 18 | 3000 |
| CCR5-3578 | + | UAUUGAAGGCGAAAAGAAU | 19 | 3001 |
| CCR5-3579 | + | GUAUUGAAGGCGAAAAGAAU | 20 | 3002 |
| CCR5-3580 | + | UGUAUUGAAGGCGAAAAGAAU | 21 | 3003 |
| CCR5-3581 | + | GUGUAUUGAAGGCGAAAAGAAU | 22 | 3004 |
| CCR5-3582 | + | AGUGUAUUGAAGGCGAAAAGAAU | 23 | 3005 |
| CCR5-3583 | + | AAGUGUAUUGAAGGCGAAAAGAAU | 24 | 3006 |
| CCR5-3584 | + | AUAAAGAAUAAAGGAUAU | 18 | 3007 |
| CCR5-3585 | + | UAUAAAGAAUAAAGGAUAU | 19 | 3008 |
| CCR5-3586 | + | AUAUAAAGAAUAAAGGAUAU | 20 | 3009 |
| CCR5-3587 | + | AAUAUAAAGAAUAAAGGAUAU | 21 | 3010 |
| CCR5-3588 | + | AAAUAUAAAGAAUAAAGGAUAU | 22 | 3011 |
| CCR5-3589 | + | AAAAUAUAAAGAAUAAAGGAUAU | 23 | 3012 |
| CCR5-3590 | + | GAAAAUAUAAAGAAUAAAGGAUAU | 24 | 3013 |
| CCR5-3591 | + | CUAACAGGCCAAGCAGCU | 18 | 3014 |
| CCR5-3592 | + | ACUAACAGGCCAAGCAGCU | 19 | 3015 |
| CCR5-3593 | + | AACUAACAGGCCAAGCAGCU | 20 | 3016 |
| CCR5-3594 | + | UAACUAACAGGCCAAGCAGCU | 21 | 3017 |
| CCR5-3595 | + | CUAACUAACAGGCCAAGCAGCU | 22 | 3018 |
| CCR5-3596 | + | GCUAACUAACAGGCCAAGCAGCU | 23 | 3019 |
| CCR5-3597 | + | AGCUAACUAACAGGCCAAGCAGCU | 24 | 3020 |
| CCR5-3598 | + | AAAGUCUUUUACUCAUCU | 18 | 3021 |
| CCR5-3599 | + | UAAAGUCUUUUACUCAUCU | 19 | 3022 |
| CCR5-3600 | + | GUAAAGUCUUUUACUCAUCU | 20 | 3023 |
| CCR5-3601 | + | UGUAAAGUCUUUUACUCAUCU | 21 | 3024 |
| CCR5-3602 | + | CUGUAAAGUCUUUUACUCAUCU | 22 | 3025 |
| CCR5-3603 | + | CCUGUAAAGUCUUUUACUCAUCU | 23 | 3026 |
| CCR5-3604 | + | UCCUGUAAAGUCUUUUACUCAUCU | 24 | 3027 |
| CCR5-3605 | + | UAUAGACAGUAUAAAAGU | 18 | 3028 |
| CCR5-3606 | + | AUAUAGACAGUAUAAAAGU | 19 | 3029 |
| CCR5-2967 | + | CAUAUAGACAGUAUAAAAGU | 20 | 3030 |
| CCR5-3607 | + | UCAUAUAGACAGUAUAAAAGU | 21 | 3031 |
| CCR5-3608 | + | AUCAUAUAGACAGUAUAAAAGU | 22 | 3032 |
| CCR5-3609 | + | AAUCAUAUAGACAGUAUAAAAGU | 23 | 3033 |
| CCR5-3610 | + | CAAUCAUAUAGACAGUAUAAAAGU | 24 | 3034 |
| CCR5-3611 | + | CUUUGAUGUUAUAACCGU | 18 | 3035 |
| CCR5-3612 | + | UCUUUGAUGUUAUAACCGU | 19 | 3036 |
| CCR5-3613 | + | AUCUUUGAUGUUAUAACCGU | 20 | 3037 |
| CCR5-3614 | + | UAUCUUUGAUGUUAUAACCGU | 21 | 3038 |
| CCR5-3615 | + | GUAUCUUUGAUGUUAUAACCGU | 22 | 3039 |
| CCR5-3616 | + | UGUAUCUUUGAUGUUAUAACCGU | 23 | 3040 |
| CCR5-3617 | + | UUGUAUCUUUGAUGUUAUAACCGU | 24 | 3041 |
| CCR5-3618 | + | AGAGAAUAGAUCUCUGGU | 18 | 3042 |
| CCR5-3619 | + | UAGAGAAUAGAUCUCUGGU | 19 | 3043 |
| CCR5-3620 | + | CUAGAGAAUAGAUCUCUGGU | 20 | 3044 |
| CCR5-3621 | + | GCUAGAGAAUAGAUCUCUGGU | 21 | 3045 |
| CCR5-3622 | + | AGCUAGAGAAUAGAUCUCUGGU | 22 | 3046 |
| CCR5-3623 | + | AAGCUAGAGAAUAGAUCUCUGGU | 23 | 3047 |
| CCR5-3624 | + | UAAGCUAGAGAAUAGAUCUCUGGU | 24 | 3048 |
| CCR5-3625 | + | CCACUACACAGAAUCUGU | 18 | 3049 |
| CCR5-3626 | + | CCCACUACACAGAAUCUGU | 19 | 3050 |
| CCR5-3627 | + | UCCCACUACACAGAAUCUGU | 20 | 3051 |
| CCR5-3628 | + | AUCCCACUACACAGAAUCUGU | 21 | 3052 |
| CCR5-3629 | + | CAUCCCACUACACAGAAUCUGU | 22 | 3053 |
| CCR5-3630 | + | UCAUCCCACUACACAGAAUCUGU | 23 | 3054 |
| CCR5-3631 | + | CUCAUCCCACUACACAGAAUCUGU | 24 | 3055 |
| CCR5-3632 | + | AUAUUUUAAGAUAAUUGU | 18 | 3056 |
| CCR5-3633 | + | UAUAUUUUAAGAUAAUUGU | 19 | 3057 |
| CCR5-3634 | + | UUAUAUUUUAAGAUAAUUGU | 20 | 3058 |
| CCR5-3635 | + | AUUAUAUUUUAAGAUAAUUGU | 21 | 3059 |
| CCR5-3636 | + | GAUUAUAUUUUAAGAUAAUUGU | 22 | 3060 |
| CCR5-3637 | + | AGAUUAUAUUUUAAGAUAAUUGU | 23 | 3061 |
| CCR5-3638 | + | AAGAUUAUAUUUUAAGAUAAUUGU | 24 | 3062 |
| CCR5-3639 | + | CCGGGGAGAGUUUCUUGU | 18 | 3063 |
| CCR5-3640 | + | ACCGGGGAGAGUUUCUUGU | 19 | 3064 |
| CCR5-2974 | + | UACCGGGGAGAGUUUCUUGU | 20 | 3065 |
| CCR5-3641 | + | UUACCGGGGAGAGUUUCUUGU | 21 | 3066 |
| CCR5-3642 | + | CUUACCGGGGAGAGUUUCUUGU | 22 | 3067 |
| CCR5-3643 | + | ACUUACCGGGGAGAGUUUCUUGU | 23 | 3068 |
| CCR5-3644 | + | UACUUACCGGGGAGAGUUUCUUGU | 24 | 3069 |
| CCR5-3645 | + | UCUCUGCAAAUCUUUCUU | 18 | 3070 |
| CCR5-3646 | + | CUCUCUGCAAAUCUUUCUU | 19 | 3071 |
| CCR5-3647 | + | UCUCUCUGCAAAUCUUUCUU | 20 | 3072 |
| CCR5-3648 | + | AUCUCUCUGCAAAUCUUUCUU | 21 | 3073 |
| CCR5-3649 | + | CAUCUCUCUGCAAAUCUUUCUU | 22 | 3074 |
| CCR5-3650 | + | UCAUCUCUCUGCAAAUCUUUCUU | 23 | 3075 |
| CCR5-3651 | + | CUCAUCUCUCUGCAAAUCUUUCUU | 24 | 3076 |
| CCR5-3652 | + | UAGGAAAUGCUGUUUCUU | 18 | 3077 |
| CCR5-3653 | + | GUAGGAAAUGCUGUUUCUU | 19 | 3078 |
| CCR5-3654 | + | AGUAGGAAAUGCUGUUUCUU | 20 | 3079 |
| CCR5-3655 | + | AAGUAGGAAAUGCUGUUUCUU | 21 | 3080 |
| CCR5-3656 | + | AAAGUAGGAAAUGCUGUUUCUU | 22 | 3081 |
| CCR5-3657 | + | AAAAGUAGGAAAUGCUGUUUCUU | 23 | 3082 |
| CCR5-3658 | + | UAAAAGUAGGAAAUGCUGUUUCUU | 24 | 3083 |
| CCR5-3659 | + | CAGUAAGGCUAAAAGGUU | 18 | 3084 |
| CCR5-3660 | + | ACAGUAAGGCUAAAAGGUU | 19 | 3085 |
| CCR5-3661 | + | AACAGUAAGGCUAAAAGGUU | 20 | 3086 |
| CCR5-3662 | + | CAACAGUAAGGCUAAAAGGUU | 21 | 3087 |
| CCR5-3663 | + | UCAACAGUAAGGCUAAAAGGUU | 22 | 3088 |
| CCR5-3664 | + | UUCAACAGUAAGGCUAAAAGGUU | 23 | 3089 |
| CCR5-3665 | + | UUUCAACAGUAAGGCUAAAAGGUU | 24 | 3090 |
| CCR5-3666 | + | UGGUCUGAAGGUUUAUUU | 18 | 3091 |
| CCR5-3667 | + | CUGGUCUGAAGGUUUAUUU | 19 | 3092 |
| CCR5-3668 | + | UCUGGUCUGAAGGUUUAUUU | 20 | 3093 |
| CCR5-3669 | + | CUCUGGUCUGAAGGUUUAUUU | 21 | 3094 |
| CCR5-3670 | + | UCUCUGGUCUGAAGGUUUAUUU | 22 | 3095 |
| CCR5-3671 | + | AUCUCUGGUCUGAAGGUUUAUUU | 23 | 3096 |
| CCR5-3672 | + | GAUCUCUGGUCUGAAGGUUUAUUU | 24 | 3097 |
| CCR5-3673 | + | UCUGCAAAUCUUUCUUUU | 18 | 3098 |
| CCR5-3674 | + | CUCUGCAAAUCUUUCUUUU | 19 | 3099 |
| CCR5-3675 | + | UCUCUGCAAAUCUUUCUUUU | 20 | 3100 |
| CCR5-3676 | + | CUCUCUGCAAAUCUUUCUUUU | 21 | 3101 |
| CCR5-3677 | + | UCUCUCUGCAAAUCUUUCUUUU | 22 | 3102 |
| CCR5-3678 | + | AUCUCUCUGCAAAUCUUUCUUUU | 23 | 3103 |
| CCR5-3679 | + | CAUCUCUCUGCAAAUCUUUCUUUU | 24 | 3104 |
| CCR5-3680 | − | GGGGAGAGUGGAGAAAAA | 18 | 3105 |
| CCR5-3681 | − | CGGGGAGAGUGGAGAAAAA | 19 | 3106 |
| CCR5-2905 | − | ACGGGGAGAGUGGAGAAAAA | 20 | 3107 |
| CCR5-3682 | − | UACGGGGAGAGUGGAGAAAAA | 21 | 3108 |
| CCR5-3683 | − | AUACGGGGAGAGUGGAGAAAAA | 22 | 3109 |
| CCR5-3684 | − | GAUACGGGGAGAGUGGAGAAAAA | 23 | 3110 |
| CCR5-3685 | − | GGAUACGGGGAGAGUGGAGAAAAA | 24 | 3111 |
| CCR5-3686 | − | CGGGGAGAGUGGAGAAAA | 18 | 3112 |
| CCR5-3687 | − | ACGGGGAGAGUGGAGAAAA | 19 | 3113 |
| CCR5-2906 | − | UACGGGGAGAGUGGAGAAAA | 20 | 3114 |
| CCR5-3688 | − | AUACGGGGAGAGUGGAGAAAA | 21 | 3115 |
| CCR5-3689 | − | GAUACGGGGAGAGUGGAGAAAA | 22 | 3116 |
| CCR5-3690 | − | GGAUACGGGGAGAGUGGAGAAAA | 23 | 3117 |
| CCR5-3691 | − | GGGAUACGGGGAGAGUGGAGAAAA | 24 | 3118 |
| CCR5-3692 | − | ACGGGGAGAGUGGAGAAA | 18 | 3119 |
| CCR5-3693 | − | UACGGGGAGAGUGGAGAAA | 19 | 3120 |
| CCR5-3694 | − | AUACGGGGAGAGUGGAGAAA | 20 | 3121 |
| CCR5-3695 | − | GAUACGGGGAGAGUGGAGAAA | 21 | 3122 |
| CCR5-3696 | − | GGAUACGGGGAGAGUGGAGAAA | 22 | 3123 |
| CCR5-3697 | − | GGGAUACGGGGAGAGUGGAGAAA | 23 | 3124 |
| CCR5-3698 | − | GGGGAUACGGGGAGAGUGGAGAAA | 24 | 3125 |
| CCR5-3699 | − | UUUUAAGCUCAACUUAAA | 18 | 3126 |
| CCR5-3700 | − | AUUUUAAGCUCAACUUAAA | 19 | 3127 |
| CCR5-3701 | − | UAUUUUAAGCUCAACUUAAA | 20 | 3128 |
| CCR5-3702 | − | UUAUUUUAAGCUCAACUUAAA | 21 | 3129 |
| CCR5-3703 | − | CUUAUUUUAAGCUCAACUUAAA | 22 | 3130 |
| CCR5-3704 | − | GCUUAUUUUAAGCUCAACUUAAA | 23 | 3131 |
| CCR5-3705 | − | AGCUUAUUUUAAGCUCAACUUAAA | 24 | 3132 |
| CCR5-3706 | − | UGAGUGAAAGACUUUAAA | 18 | 3133 |
| CCR5-3707 | − | GUGAGUGAAAGACUUUAAA | 19 | 3134 |
| CCR5-2909 | − | UGUGAGUGAAAGACUUUAAA | 20 | 3135 |
| CCR5-3708 | − | UUGUGAGUGAAAGACUUUAAA | 21 | 3136 |
| CCR5-3709 | − | AUUGUGAGUGAAAGACUUUAAA | 22 | 3137 |
| CCR5-3710 | − | GAUUGUGAGUGAAAGACUUUAAA | 23 | 3138 |
| CCR5-3711 | − | UGAUUGUGAGUGAAAGACUUUAAA | 24 | 3139 |
| CCR5-3712 | − | ACAAUCCUUACCUCUCAA | 18 | 3140 |
| CCR5-3713 | − | AACAAUCCUUACCUCUCAA | 19 | 3141 |
| CCR5-3714 | − | UAACAAUCCUUACCUCUCAA | 20 | 3142 |
| CCR5-3715 | − | CUAACAAUCCUUACCUCUCAA | 21 | 3143 |
| CCR5-3716 | − | ACUAACAAUCCUUACCUCUCAA | 22 | 3144 |
| CCR5-3717 | − | AACUAACAAUCCUUACCUCUCAA | 23 | 3145 |
| CCR5-3718 | − | UAACUAACAAUCCUUACCUCUCAA | 24 | 3146 |
| CCR5-3719 | − | AACUCCACCCUCCUUCAA | 18 | 3147 |
| CCR5-3720 | − | UAACUCCACCCUCCUUCAA | 19 | 3148 |
| CCR5-3721 | − | UUAACUCCACCCUCCUUCAA | 20 | 3149 |
| CCR5-3722 | − | UUUAACUCCACCCUCCUUCAA | 21 | 3150 |
| CCR5-3723 | − | AUUUAACUCCACCCUCCUUCAA | 22 | 3151 |
| CCR5-3724 | − | GAUUUAACUCCACCCUCCUUCAA | 23 | 3152 |
| CCR5-3725 | − | UGAUUUAACUCCACCCUCCUUCAA | 24 | 3153 |
| CCR5-3726 | − | GUGAGUGAAAGACUUUAA | 18 | 3154 |
| CCR5-3727 | − | UGUGAGUGAAAGACUUUAA | 19 | 3155 |
| CCR5-2913 | − | UUGUGAGUGAAAGACUUUAA | 20 | 3156 |
| CCR5-3728 | − | AUUGUGAGUGAAAGACUUUAA | 21 | 3157 |
| CCR5-3729 | − | GAUUGUGAGUGAAAGACUUUAA | 22 | 3158 |
| CCR5-3730 | − | UGAUUGUGAGUGAAAGACUUUAA | 23 | 3159 |
| CCR5-3731 | − | AUGAUUGUGAGUGAAAGACUUUAA | 24 | 3160 |
| CCR5-3732 | − | GACUUUACAGGAAACCCA | 18 | 3161 |
| CCR5-3733 | − | AGACUUUACAGGAAACCCA | 19 | 3162 |
| CCR5-3734 | − | AAGACUUUACAGGAAACCCA | 20 | 3163 |
| CCR5-3735 | − | AAAGACUUUACAGGAAACCCA | 21 | 3164 |
| CCR5-3736 | − | AAAAGACUUUACAGGAAACCCA | 22 | 3165 |
| CCR5-3737 | − | UAAAAGACUUUACAGGAAACCCA | 23 | 3166 |
| CCR5-3738 | − | GUAAAAGACUUUACAGGAAACCCA | 24 | 3167 |
| CCR5-3739 | − | CAAAAACAAAAUAAUCCA | 18 | 3168 |
| CCR5-3740 | − | ACAAAAACAAAAUAAUCCA | 19 | 3169 |
| CCR5-3741 | − | AACAAAAACAAAAUAAUCCA | 20 | 3170 |
| CCR5-3742 | − | GAACAAAAACAAAAUAAUCCA | 21 | 3171 |
| CCR5-3743 | − | AGAACAAAAACAAAAUAAUCCA | 22 | 3172 |
| CCR5-3744 | − | GAGAACAAAAACAAAAUAAUCCA | 23 | 3173 |
| CCR5-3745 | − | AGAGAACAAAAACAAAAUAAUCCA | 24 | 3174 |
| CCR5-3746 | − | AGAACUAAACCCUCUCCA | 18 | 3175 |
| CCR5-3747 | − | GAGAACUAAACCCUCUCCA | 19 | 3176 |
| CCR5-3748 | − | GGAGAACUAAACCCUCUCCA | 20 | 3177 |
| CCR5-3749 | − | AGGAGAACUAAACCCUCUCCA | 21 | 3178 |
| CCR5-3750 | − | AAGGAGAACUAAACCCUCUCCA | 22 | 3179 |
| CCR5-3751 | − | UAAGGAGAACUAAACCCUCUCCA | 23 | 3180 |
| CCR5-3752 | − | CUAAGGAGAACUAAACCCUCUCCA | 24 | 3181 |
| CCR5-3753 | − | UGUGUAGUGGGAUGAGCA | 18 | 3182 |
| CCR5-3754 | − | CUGUGUAGUGGGAUGAGCA | 19 | 3183 |
| CCR5-3755 | − | UCUGUGUAGUGGGAUGAGCA | 20 | 3184 |
| CCR5-3756 | − | UUCUGUGUAGUGGGAUGAGCA | 21 | 3185 |
| CCR5-3757 | − | AUUCUGUGUAGUGGGAUGAGCA | 22 | 3186 |
| CCR5-3758 | − | GAUUCUGUGUAGUGGGAUGAGCA | 23 | 3187 |
| CCR5-3759 | − | AGAUUCUGUGUAGUGGGAUGAGCA | 24 | 3188 |
| CCR5-3760 | − | UCAAAAGAAAGAUUUGCA | 18 | 3189 |
| CCR5-3761 | − | CUCAAAAGAAAGAUUUGCA | 19 | 3190 |
| CCR5-3762 | − | UCUCAAAAGAAAGAUUUGCA | 20 | 3191 |
| CCR5-3763 | − | CUCUCAAAAGAAAGAUUUGCA | 21 | 3192 |
| CCR5-3764 | − | CCUCUCAAAAGAAAGAUUUGCA | 22 | 3193 |
| CCR5-3765 | − | ACCUCUCAAAAGAAAGAUUUGCA | 23 | 3194 |
| CCR5-3766 | − | UACCUCUCAAAAGAAAGAUUUGCA | 24 | 3195 |
| CCR5-3767 | − | AUAGGGGAUACGGGGAGA | 18 | 3196 |
| CCR5-3768 | − | GAUAGGGGAUACGGGGAGA | 19 | 3197 |
| CCR5-3769 | − | GGAUAGGGGAUACGGGGAGA | 20 | 3198 |
| CCR5-3770 | − | GGGAUAGGGGAUACGGGGAGA | 21 | 3199 |
| CCR5-3771 | − | UGGGAUAGGGGAUACGGGGAGA | 22 | 3200 |
| CCR5-3772 | − | GUGGGAUAGGGGAUACGGGGAGA | 23 | 3201 |
| CCR5-3773 | − | GGUGGGAUAGGGGAUACGGGGAGA | 24 | 3202 |
| CCR5-3774 | − | GUGGGGGUUGGGGUGGGA | 18 | 3203 |
| CCR5-3775 | − | UGUGGGGGUUGGGGUGGGA | 19 | 3204 |
| CCR5-3776 | − | GUGUGGGGGUUGGGGUGGGA | 20 | 3205 |
| CCR5-3777 | − | UGUGUGGGGGUUGGGGUGGGA | 21 | 3206 |
| CCR5-3778 | − | CUGUGUGGGGGUUGGGGUGGGA | 22 | 3207 |
| CCR5-3779 | − | UCUGUGUGGGGGUUGGGGUGGGA | 23 | 3208 |
| CCR5-3780 | − | AUCUGUGUGGGGGUUGGGGUGGGA | 24 | 3209 |
| CCR5-3781 | − | UACAAAACAUGAUUGUGA | 18 | 3210 |
| CCR5-3782 | − | AUACAAAACAUGAUUGUGA | 19 | 3211 |
| CCR5-3783 | − | GAUACAAAACAUGAUUGUGA | 20 | 3212 |
| CCR5-3784 | − | AGAUACAAAACAUGAUUGUGA | 21 | 3213 |
| CCR5-3785 | − | AAGAUACAAAACAUGAUUGUGA | 22 | 3214 |
| CCR5-3786 | − | AAAGAUACAAAACAUGAUUGUGA | 23 | 3215 |
| CCR5-3787 | − | CAAAGAUACAAAACAUGAUUGUGA | 24 | 3216 |
| CCR5-3788 | − | AAUAUAAUCUUUAAGAUA | 18 | 3217 |
| CCR5-3789 | − | AAAUAUAAUCUUUAAGAUA | 19 | 3218 |
| CCR5-2922 | − | AAAAUAUAAUCUUUAAGAUA | 20 | 3219 |
| CCR5-3790 | − | UAAAAUAUAAUCUUUAAGAUA | 21 | 3220 |
| CCR5-3791 | − | UUAAAAUAUAAUCUUUAAGAUA | 22 | 3221 |
| CCR5-3792 | − | CUUAAAAUAUAAUCUUUAAGAUA | 23 | 3222 |
| CCR5-3793 | − | UCUUAAAAUAUAAUCUUUAAGAUA | 24 | 3223 |
| CCR5-3794 | − | GGGGUGGGAUAGGGGAUA | 18 | 3224 |
| CCR5-3795 | − | UGGGGUGGGAUAGGGGAUA | 19 | 3225 |
| CCR5-2923 | − | UUGGGGUGGGAUAGGGGAUA | 20 | 3226 |
| CCR5-3796 | − | GUUGGGGUGGGAUAGGGGAUA | 21 | 3227 |
| CCR5-3797 | − | GGUUGGGGUGGGAUAGGGGAUA | 22 | 3228 |
| CCR5-3798 | − | GGGUUGGGGUGGGAUAGGGGAUA | 23 | 3229 |
| CCR5-3799 | − | GGGGUUGGGGUGGGAUAGGGGAUA | 24 | 3230 |
| CCR5-3800 | − | AAAUCUUAUCUUCUGCUA | 18 | 3231 |
| CCR5-3801 | − | GAAAUCUUAUCUUCUGCUA | 19 | 3232 |
| CCR5-2925 | − | UGAAAUCUUAUCUUCUGCUA | 20 | 3233 |
| CCR5-3802 | − | UUGAAAUCUUAUCUUCUGCUA | 21 | 3234 |
| CCR5-3803 | − | CUUGAAAUCUUAUCUUCUGCUA | 22 | 3235 |
| CCR5-3804 | − | UCUUGAAAUCUUAUCUUCUGCUA | 23 | 3236 |
| CCR5-3805 | − | AUCUUGAAAUCUUAUCUUCUGCUA | 24 | 3237 |
| CCR5-3806 | − | UCUAACAGAUUCUGUGUA | 18 | 3238 |
| CCR5-3807 | − | UUCUAACAGAUUCUGUGUA | 19 | 3239 |
| CCR5-3808 | − | UUUCUAACAGAUUCUGUGUA | 20 | 3240 |
| CCR5-3809 | − | UUUUCUAACAGAUUCUGUGUA | 21 | 3241 |
| CCR5-3810 | − | AUUUUCUAACAGAUUCUGUGUA | 22 | 3242 |
| CCR5-3811 | − | UAUUUUCUAACAGAUUCUGUGUA | 23 | 3243 |
| CCR5-3812 | − | AUAUUUUCUAACAGAUUCUGUGUA | 24 | 3244 |
| CCR5-3813 | − | GAUGAGUAAAAGACUUUA | 18 | 3245 |
| CCR5-3814 | − | AGAUGAGUAAAAGACUUUA | 19 | 3246 |
| CCR5-3815 | − | GAGAUGAGUAAAAGACUUUA | 20 | 3247 |
| CCR5-3816 | − | UGAGAUGAGUAAAAGACUUUA | 21 | 3248 |
| CCR5-3817 | − | CUGAGAUGAGUAAAAGACUUUA | 22 | 3249 |
| CCR5-3818 | − | UCUGAGAUGAGUAAAAGACUUUA | 23 | 3250 |
| CCR5-3819 | − | UUCUGAGAUGAGUAAAAGACUUUA | 24 | 3251 |
| CCR5-3820 | − | UGUGAGUGAAAGACUUUA | 18 | 3252 |
| CCR5-3821 | − | UUGUGAGUGAAAGACUUUA | 19 | 3253 |
| CCR5-3822 | − | AUUGUGAGUGAAAGACUUUA | 20 | 3254 |
| CCR5-3823 | − | GAUUGUGAGUGAAAGACUUUA | 21 | 3255 |
| CCR5-3824 | − | UGAUUGUGAGUGAAAGACUUUA | 22 | 3256 |
| CCR5-3825 | − | AUGAUUGUGAGUGAAAGACUUUA | 23 | 3257 |
| CCR5-3826 | − | CAUGAUUGUGAGUGAAAGACUUUA | 24 | 3258 |
| CCR5-3827 | − | GUAAAUAAACCUUCAGAC | 18 | 3259 |
| CCR5-3828 | − | CGUAAAUAAACCUUCAGAC | 19 | 3260 |
| CCR5-3829 | − | CCGUAAAUAAACCUUCAGAC | 20 | 3261 |
| CCR5-3830 | − | CCCGUAAAUAAACCUUCAGAC | 21 | 3262 |
| CCR5-3831 | − | GCCCGUAAAUAAACCUUCAGAC | 22 | 3263 |
| CCR5-3832 | − | AGCCCGUAAAUAAACCUUCAGAC | 23 | 3264 |
| CCR5-3833 | − | AAGCCCGUAAAUAAACCUUCAGAC | 24 | 3265 |
| CCR5-3834 | − | GGGUGGGAUAGGGGAUAC | 18 | 3266 |
| CCR5-3835 | − | GGGGUGGGAUAGGGGAUAC | 19 | 3267 |
| CCR5-2934 | − | UGGGGUGGGAUAGGGGAUAC | 20 | 3268 |
| CCR5-3836 | − | UUGGGGUGGGAUAGGGGAUAC | 21 | 3269 |
| CCR5-3837 | − | GUUGGGGUGGGAUAGGGGAUAC | 22 | 3270 |
| CCR5-3838 | − | GGUUGGGGUGGGAUAGGGGAUAC | 23 | 3271 |
| CCR5-3839 | − | GGGUUGGGGUGGGAUAGGGGAUAC | 24 | 3272 |
| CCR5-3840 | − | AGACAUCCGUUCCCCUAC | 18 | 3273 |
| CCR5-3841 | − | GAGACAUCCGUUCCCCUAC | 19 | 3274 |
| CCR5-3842 | − | UGAGACAUCCGUUCCCCUAC | 20 | 3275 |
| CCR5-3843 | − | CUGAGACAUCCGUUCCCCUAC | 21 | 3276 |
| CCR5-3844 | − | GCUGAGACAUCCGUUCCCCUAC | 22 | 3277 |
| CCR5-3845 | − | AGCUGAGACAUCCGUUCCCCUAC | 23 | 3278 |
| CCR5-3846 | − | GAGCUGAGACAUCCGUUCCCCUAC | 24 | 3279 |
| CCR5-3847 | − | AUGAGUAAAAGACUUUAC | 18 | 3280 |
| CCR5-3848 | − | GAUGAGUAAAAGACUUUAC | 19 | 3281 |
| CCR5-2936 | − | AGAUGAGUAAAAGACUUUAC | 20 | 3282 |
| CCR5-3849 | − | GAGAUGAGUAAAAGACUUUAC | 21 | 3283 |
| CCR5-3850 | − | UGAGAUGAGUAAAAGACUUUAC | 22 | 3284 |
| CCR5-3851 | − | CUGAGAUGAGUAAAAGACUUUAC | 23 | 3285 |
| CCR5-3852 | − | UCUGAGAUGAGUAAAAGACUUUAC | 24 | 3286 |
| CCR5-3853 | − | UUGCACAGCUCAUCUGGC | 18 | 3287 |
| CCR5-3854 | − | UUUGCACAGCUCAUCUGGC | 19 | 3288 |
| CCR5-3855 | − | AUUUGCACAGCUCAUCUGGC | 20 | 3289 |
| CCR5-3856 | − | GAUUUGCACAGCUCAUCUGGC | 21 | 3290 |
| CCR5-3857 | − | UGAUUUGCACAGCUCAUCUGGC | 22 | 3291 |
| CCR5-3858 | − | UUGAUUUGCACAGCUCAUCUGGC | 23 | 3292 |
| CCR5-3859 | − | AUUGAUUUGCACAGCUCAUCUGGC | 24 | 3293 |
| CCR5-3860 | − | UGAGUCUUAGCUGAAAUC | 18 | 3294 |
| CCR5-3861 | − | AUGAGUCUUAGCUGAAAUC | 19 | 3295 |
| CCR5-3862 | − | GAUGAGUCUUAGCUGAAAUC | 20 | 3296 |
| CCR5-3863 | − | AGAUGAGUCUUAGCUGAAAUC | 21 | 3297 |
| CCR5-3864 | − | GAGAUGAGUCUUAGCUGAAAUC | 22 | 3298 |
| CCR5-3865 | − | AGAGAUGAGUCUUAGCUGAAAUC | 23 | 3299 |
| CCR5-3866 | − | GAGAGAUGAGUCUUAGCUGAAAUC | 24 | 3300 |
| CCR5-3867 | − | UAAGCUCAACUUAAAAAG | 18 | 3301 |
| CCR5-3868 | − | UUAAGCUCAACUUAAAAAG | 19 | 3302 |
| CCR5-3869 | − | UUUAAGCUCAACUUAAAAAG | 20 | 3303 |
| CCR5-3870 | − | UUUUAAGCUCAACUUAAAAAG | 21 | 3304 |
| CCR5-3871 | − | AUUUUAAGCUCAACUUAAAAAG | 22 | 3305 |
| CCR5-3872 | − | UAUUUUAAGCUCAACUUAAAAAG | 23 | 3306 |
| CCR5-3873 | − | UUAUUUUAAGCUCAACUUAAAAAG | 24 | 3307 |
| CCR5-3874 | − | AUCUUAUCUUCUGCUAAG | 18 | 3308 |
| CCR5-3875 | − | AAUCUUAUCUUCUGCUAAG | 19 | 3309 |
| CCR5-3876 | − | AAAUCUUAUCUUCUGCUAAG | 20 | 3310 |
| CCR5-3877 | − | GAAAUCUUAUCUUCUGCUAAG | 21 | 3311 |
| CCR5-3878 | − | UGAAAUCUUAUCUUCUGCUAAG | 22 | 3312 |
| CCR5-3879 | − | UUGAAAUCUUAUCUUCUGCUAAG | 23 | 3313 |
| CCR5-3880 | − | CUUGAAAUCUUAUCUUCUGCUAAG | 24 | 3314 |
| CCR5-3881 | − | CACAGCUCAUCUGGCCAG | 18 | 3315 |
| CCR5-3882 | − | GCACAGCUCAUCUGGCCAG | 19 | 3316 |
| CCR5-3883 | − | UGCACAGCUCAUCUGGCCAG | 20 | 3317 |
| CCR5-3884 | − | UUGCACAGCUCAUCUGGCCAG | 21 | 3318 |
| CCR5-3885 | − | UUUGCACAGCUCAUCUGGCCAG | 22 | 3319 |
| CCR5-3886 | − | AUUUGCACAGCUCAUCUGGCCAG | 23 | 3320 |
| CCR5-3887 | − | GAUUUGCACAGCUCAUCUGGCCAG | 24 | 3321 |
| CCR5-3888 | − | CUCAUCUGGCCAGAAGAG | 18 | 3322 |
| CCR5-3889 | − | GCUCAUCUGGCCAGAAGAG | 19 | 3323 |
| CCR5-3890 | − | AGCUCAUCUGGCCAGAAGAG | 20 | 3324 |
| CCR5-3891 | − | CAGCUCAUCUGGCCAGAAGAG | 21 | 3325 |
| CCR5-3892 | − | ACAGCUCAUCUGGCCAGAAGAG | 22 | 3326 |
| CCR5-3893 | − | CACAGCUCAUCUGGCCAGAAGAG | 23 | 3327 |
| CCR5-3894 | − | GCACAGCUCAUCUGGCCAGAAGAG | 24 | 3328 |
| CCR5-3895 | − | UAGGGGAUACGGGGAGAG | 18 | 3329 |
| CCR5-3896 | − | AUAGGGGAUACGGGGAGAG | 19 | 3330 |
| CCR5-2819 | − | GAUAGGGGAUACGGGGAGAG | 20 | 3331 |
| CCR5-3897 | − | GGAUAGGGGAUACGGGGAGAG | 21 | 3332 |
| CCR5-3898 | − | GGGAUAGGGGAUACGGGGAGAG | 22 | 3333 |
| CCR5-3899 | − | UGGGAUAGGGGAUACGGGGAGAG | 23 | 3334 |
| CCR5-3900 | − | GUGGGAUAGGGGAUACGGGGAGAG | 24 | 3335 |
| CCR5-3901 | − | UCUGUGUAGUGGGAUGAG | 18 | 3336 |
| CCR5-3902 | − | UUCUGUGUAGUGGGAUGAG | 19 | 3337 |
| CCR5-3903 | − | AUUCUGUGUAGUGGGAUGAG | 20 | 3338 |
| CCR5-3904 | − | GAUUCUGUGUAGUGGGAUGAG | 21 | 3339 |
| CCR5-3905 | − | AGAUUCUGUGUAGUGGGAUGAG | 22 | 3340 |
| CCR5-3906 | − | CAGAUUCUGUGUAGUGGGAUGAG | 23 | 3341 |
| CCR5-3907 | − | ACAGAUUCUGUGUAGUGGGAUGAG | 24 | 3342 |
| CCR5-3908 | − | CAGAGAGAUGAGUCUUAG | 18 | 3343 |
| CCR5-3909 | − | GCAGAGAGAUGAGUCUUAG | 19 | 3344 |
| CCR5-3910 | − | UGCAGAGAGAUGAGUCUUAG | 20 | 3345 |
| CCR5-3911 | − | UUGCAGAGAGAUGAGUCUUAG | 21 | 3346 |
| CCR5-3912 | − | UUUGCAGAGAGAUGAGUCUUAG | 22 | 3347 |
| CCR5-3913 | − | AUUUGCAGAGAGAUGAGUCUUAG | 23 | 3348 |
| CCR5-3914 | − | GAUUUGCAGAGAGAUGAGUCUUAG | 24 | 3349 |
| CCR5-3915 | − | GGUGGGAUAGGGGAUACG | 18 | 3350 |
| CCR5-3916 | − | GGGUGGGAUAGGGGAUACG | 19 | 3351 |
| CCR5-2951 | − | GGGGUGGGAUAGGGGAUACG | 20 | 3352 |
| CCR5-3917 | − | UGGGGUGGGAUAGGGGAUACG | 21 | 3353 |
| CCR5-3918 | − | UUGGGGUGGGAUAGGGGAUACG | 22 | 3354 |
| CCR5-3919 | − | GUUGGGGUGGGAUAGGGGAUACG | 23 | 3355 |
| CCR5-3920 | − | GGUUGGGGUGGGAUAGGGGAUACG | 24 | 3356 |
| CCR5-3921 | − | UGAGCAUCUGUGUGGGGG | 18 | 3357 |
| CCR5-3922 | − | GUGAGCAUCUGUGUGGGGG | 19 | 3358 |
| CCR5-3923 | − | GGUGAGCAUCUGUGUGGGGG | 20 | 3359 |
| CCR5-3924 | − | UGGUGAGCAUCUGUGUGGGGG | 21 | 3360 |
| CCR5-3925 | − | GUGGUGAGCAUCUGUGUGGGGG | 22 | 3361 |
| CCR5-3926 | − | GGUGGUGAGCAUCUGUGUGGGGG | 23 | 3362 |
| CCR5-3927 | − | GGGUGGUGAGCAUCUGUGUGGGGG | 24 | 3363 |
| CCR5-3928 | − | CAGAUUCUGUGUAGUGGG | 18 | 3364 |
| CCR5-3929 | − | ACAGAUUCUGUGUAGUGGG | 19 | 3365 |
| CCR5-3930 | − | AACAGAUUCUGUGUAGUGGG | 20 | 3366 |
| CCR5-3931 | − | UAACAGAUUCUGUGUAGUGGG | 21 | 3367 |
| CCR5-3932 | − | CUAACAGAUUCUGUGUAGUGGG | 22 | 3368 |
| CCR5-3933 | − | UCUAACAGAUUCUGUGUAGUGGG | 23 | 3369 |
| CCR5-3934 | − | UUCUAACAGAUUCUGUGUAGUGGG | 24 | 3370 |
| CCR5-3935 | − | AUCUGUGUGGGGGUUGGG | 18 | 3371 |
| CCR5-3936 | − | CAUCUGUGUGGGGGUUGGG | 19 | 3372 |
| CCR5-3937 | − | GCAUCUGUGUGGGGGUUGGG | 20 | 3373 |
| CCR5-3938 | − | AGCAUCUGUGUGGGGGUUGGG | 21 | 3374 |
| CCR5-3939 | − | GAGCAUCUGUGUGGGGGUUGGG | 22 | 3375 |
| CCR5-3940 | − | UGAGCAUCUGUGUGGGGGUUGGG | 23 | 3376 |
| CCR5-3941 | − | GUGAGCAUCUGUGUGGGGGUUGGG | 24 | 3377 |
| CCR5-3942 | − | AACCUUUUAGCCUUACUG | 18 | 3378 |
| CCR5-3943 | − | UAACCUUUUAGCCUUACUG | 19 | 3379 |
| CCR5-3944 | − | UUAACCUUUUAGCCUUACUG | 20 | 3380 |
| CCR5-3945 | − | CUUAACCUUUUAGCCUUACUG | 21 | 3381 |
| CCR5-3946 | − | UCUUAACCUUUUAGCCUUACUG | 22 | 3382 |
| CCR5-3947 | − | UUCUUAACCUUUUAGCCUUACUG | 23 | 3383 |
| CCR5-3948 | − | UUUCUUAACCUUUUAGCCUUACUG | 24 | 3384 |
| CCR5-3949 | − | GGGGAUACGGGGAGAGUG | 18 | 3385 |
| CCR5-3950 | − | AGGGGAUACGGGGAGAGUG | 19 | 3386 |
| CCR5-3951 | − | UAGGGGAUACGGGGAGAGUG | 20 | 3387 |
| CCR5-3952 | − | AUAGGGGAUACGGGGAGAGUG | 21 | 3388 |
| CCR5-3953 | − | GAUAGGGGAUACGGGGAGAGUG | 22 | 3389 |
| CCR5-3954 | − | GGAUAGGGGAUACGGGGAGAGUG | 23 | 3390 |
| CCR5-3955 | − | GGGAUAGGGGAUACGGGGAGAGUG | 24 | 3391 |
| CCR5-3956 | − | GAACAAUAAUAUUGGGUG | 18 | 3392 |
| CCR5-3957 | − | AGAACAAUAAUAUUGGGUG | 19 | 3393 |
| CCR5-3958 | − | GAGAACAAUAAUAUUGGGUG | 20 | 3394 |
| CCR5-3959 | − | AGAGAACAAUAAUAUUGGGUG | 21 | 3395 |
| CCR5-3960 | − | CAGAGAACAAUAAUAUUGGGUG | 22 | 3396 |
| CCR5-3961 | − | ACAGAGAACAAUAAUAUUGGGUG | 23 | 3397 |
| CCR5-3962 | − | UACAGAGAACAAUAAUAUUGGGUG | 24 | 3398 |
| CCR5-3963 | − | GGGUGGUGAGCAUCUGUG | 18 | 3399 |
| CCR5-3964 | − | UGGGUGGUGAGCAUCUGUG | 19 | 3400 |
| CCR5-2959 | − | UUGGGUGGUGAGCAUCUGUG | 20 | 3401 |
| CCR5-3965 | − | AUUGGGUGGUGAGCAUCUGUG | 21 | 3402 |
| CCR5-3966 | − | UAUUGGGUGGUGAGCAUCUGUG | 22 | 3403 |
| CCR5-3967 | − | AUAUUGGGUGGUGAGCAUCUGUG | 23 | 3404 |
| CCR5-3968 | − | AAUAUUGGGUGGUGAGCAUCUGUG | 24 | 3405 |
| CCR5-3969 | − | UCUCAAAAGAAAGAUUUG | 18 | 3406 |
| CCR5-3970 | − | CUCUCAAAAGAAAGAUUUG | 19 | 3407 |
| CCR5-3971 | − | CCUCUCAAAAGAAAGAUUUG | 20 | 3408 |
| CCR5-3972 | − | ACCUCUCAAAAGAAAGAUUUG | 21 | 3409 |
| CCR5-3973 | − | UACCUCUCAAAAGAAAGAUUUG | 22 | 3410 |
| CCR5-3974 | − | UUACCUCUCAAAAGAAAGAUUUG | 23 | 3411 |
| CCR5-3975 | − | CUUACCUCUCAAAAGAAAGAUUUG | 24 | 3412 |
| CCR5-3976 | − | AAUUUCUUUUACUAAAAU | 18 | 3413 |
| CCR5-3977 | − | UAAUUUCUUUUACUAAAAU | 19 | 3414 |
| CCR5-3978 | − | GUAAUUUCUUUUACUAAAAU | 20 | 3415 |
| CCR5-3979 | − | AGUAAUUUCUUUUACUAAAAU | 21 | 3416 |
| CCR5-3980 | − | UAGUAAUUUCUUUUACUAAAAU | 22 | 3417 |
| CCR5-3981 | − | AUAGUAAUUUCUUUUACUAAAAU | 23 | 3418 |
| CCR5-3982 | − | GAUAGUAAUUUCUUUUACUAAAAU | 24 | 3419 |
| CCR5-3983 | − | AGGGGACACAGGGUUAAU | 18 | 3420 |
| CCR5-3984 | − | AAGGGGACACAGGGUUAAU | 19 | 3421 |
| CCR5-3985 | − | AAAGGGGACACAGGGUUAAU | 20 | 3422 |
| CCR5-3986 | − | AAAAGGGGACACAGGGUUAAU | 21 | 3423 |
| CCR5-3987 | − | AAAAAGGGGACACAGGGUUAAU | 22 | 3424 |
| CCR5-3988 | − | GAAAAAGGGGACACAGGGUUAAU | 23 | 3425 |
| CCR5-3989 | − | AGAAAAAGGGGACACAGGGUUAAU | 24 | 3426 |
| CCR5-3990 | − | AAAUAUAAUCUUUAAGAU | 18 | 3427 |
| CCR5-3991 | − | AAAAUAUAAUCUUUAAGAU | 19 | 3428 |
| CCR5-3992 | − | UAAAAUAUAAUCUUUAAGAU | 20 | 3429 |
| CCR5-3993 | − | UUAAAAUAUAAUCUUUAAGAU | 21 | 3430 |
| CCR5-3994 | − | CUUAAAAUAUAAUCUUUAAGAU | 22 | 3431 |
| CCR5-3995 | − | UCUUAAAAUAUAAUCUUUAAGAU | 23 | 3432 |
| CCR5-3996 | − | AUCUUAAAAUAUAAUCUUUAAGAU | 24 | 3433 |
| CCR5-3997 | − | UGGGGUGGGAUAGGGGAU | 18 | 3434 |
| CCR5-3998 | − | UUGGGGUGGGAUAGGGGAU | 19 | 3435 |
| CCR5-3999 | − | GUUGGGGUGGGAUAGGGGAU | 20 | 3436 |
| CCR5-4000 | − | GGUUGGGGUGGGAUAGGGGAU | 21 | 3437 |
| CCR5-4001 | − | GGGUUGGGGUGGGAUAGGGGAU | 22 | 3438 |
| CCR5-4002 | − | GGGGUUGGGGUGGGAUAGGGGAU | 23 | 3439 |
| CCR5-4003 | − | GGGGGUUGGGGUGGGAUAGGGGAU | 24 | 3440 |
| CCR5-4004 | − | UGGGGGUUGGGGUGGGAU | 18 | 3441 |
| CCR5-4005 | − | GUGGGGGUUGGGGUGGGAU | 19 | 3442 |
| CCR5-2962 | − | UGUGGGGGUUGGGGUGGGAU | 20 | 3443 |
| CCR5-4006 | − | GUGUGGGGGUUGGGGUGGGAU | 21 | 3444 |
| CCR5-4007 | − | UGUGUGGGGGUUGGGGUGGGAU | 22 | 3445 |
| CCR5-4008 | − | CUGUGUGGGGGUUGGGGUGGGAU | 23 | 3446 |
| CCR5-4009 | − | UCUGUGUGGGGGUUGGGGUGGGAU | 24 | 3447 |
| CCR5-4010 | − | GAAAUCUUAUCUUCUGCU | 18 | 3448 |
| CCR5-4011 | − | UGAAAUCUUAUCUUCUGCU | 19 | 3449 |
| CCR5-4012 | − | UUGAAAUCUUAUCUUCUGCU | 20 | 3450 |
| CCR5-4013 | − | CUUGAAAUCUUAUCUUCUGCU | 21 | 3451 |
| CCR5-4014 | − | UCUUGAAAUCUUAUCUUCUGCU | 22 | 3452 |
| CCR5-4015 | − | AUCUUGAAAUCUUAUCUUCUGCU | 23 | 3453 |
| CCR5-4016 | − | AAUCUUGAAAUCUUAUCUUCUGCU | 24 | 3454 |
| CCR5-4017 | − | UAAGGAAAGGGUCACAGU | 18 | 3455 |
| CCR5-4018 | − | AUAAGGAAAGGGUCACAGU | 19 | 3456 |
| CCR5-4019 | − | GAUAAGGAAAGGGUCACAGU | 20 | 3457 |
| CCR5-4020 | − | AGAUAAGGAAAGGGUCACAGU | 21 | 3458 |
| CCR5-4021 | − | AAGAUAAGGAAAGGGUCACAGU | 22 | 3459 |
| CCR5-4022 | − | UAAGAUAAGGAAAGGGUCACAGU | 23 | 3460 |
| CCR5-4023 | − | UUAAGAUAAGGAAAGGGUCACAGU | 24 | 3461 |
| CCR5-4024 | − | AAAACAAAAUAAUCCAGU | 18 | 3462 |
| CCR5-4025 | − | AAAAACAAAAUAAUCCAGU | 19 | 3463 |
| CCR5-4026 | − | CAAAAACAAAAUAAUCCAGU | 20 | 3464 |
| CCR5-4027 | − | ACAAAAACAAAAUAAUCCAGU | 21 | 3465 |
| CCR5-4028 | − | AACAAAAACAAAAUAAUCCAGU | 22 | 3466 |
| CCR5-4029 | − | GAACAAAAACAAAAUAAUCCAGU | 23 | 3467 |
| CCR5-4030 | − | AGAACAAAAACAAAAUAAUCCAGU | 24 | 3468 |
| CCR5-4031 | − | UGGGUGGUGAGCAUCUGU | 18 | 3469 |
| CCR5-4032 | − | UUGGGUGGUGAGCAUCUGU | 19 | 3470 |
| CCR5-4033 | − | AUUGGGUGGUGAGCAUCUGU | 20 | 3471 |
| CCR5-4034 | − | UAUUGGGUGGUGAGCAUCUGU | 21 | 3472 |
| CCR5-4035 | − | AUAUUGGGUGGUGAGCAUCUGU | 22 | 3473 |
| CCR5-4036 | − | AAUAUUGGGUGGUGAGCAUCUGU | 23 | 3474 |
| CCR5-4037 | − | UAAUAUUGGGUGGUGAGCAUCUGU | 24 | 3475 |
| CCR5-4038 | − | UGGCCUGUUAGUUAGCUU | 18 | 3476 |
| CCR5-4039 | − | UUGGCCUGUUAGUUAGCUU | 19 | 3477 |
| CCR5-4040 | − | CUUGGCCUGUUAGUUAGCUU | 20 | 3478 |
| CCR5-4041 | − | GCUUGGCCUGUUAGUUAGCUU | 21 | 3479 |
| CCR5-4042 | − | UGCUUGGCCUGUUAGUUAGCUU | 22 | 3480 |
| CCR5-4043 | − | CUGCUUGGCCUGUUAGUUAGCUU | 23 | 3481 |
| CCR5-4044 | − | GCUGCUUGGCCUGUUAGUUAGCUU | 24 | 3482 |

[0669] Table 6E provides exemplary targeting domains for knocking down the CCR5 gene selected according to the fifth tier parameters. Within the additional 500 bp (e.g., upstream or downstream) of a transcription start site (TSS), e.g., extending to 1 kb upstream and downstream of a TSS and PAM is NNGRRV. It is contemplated herein that in an embodiment the targeting domain hybridizes to the target domain through complementary base pairing. Any of the targeting domains in the table can be used with a S. aureus eiCas9 molecule or eiCas9 fusion protein (e.g., an eiCas9 fused to a transcription repressor domain) to alter the CCR5 gene (e.g., reduce or eliminate CCR5 gene expression, CCR5 protein function, or the level of CCR5 protein). One or more gRNAs may be used to target an eiCas9 to the promoter region of the CCR5 gene.

TABLE 6E
5th Tier

| gRNA | DNA | | Target Site | |
|---|---|---|---|---|
| Name | Strand | Targeting Domain | Length | SEQ ID NO |
| CCR5-4208 | + | UGGAGGAAAAAGAAAAAA | 18 | 3651 |
| CCR5-4209 | + | CUGGAGGAAAAAGAAAAAA | 19 | 3652 |
| CCR5-4210 | + | UCUGGAGGAAAAAGAAAAAA | 20 | 3653 |
| CCR5-4211 | + | GUCUGGAGGAAAAAGAAAAAA | 21 | 3654 |
| CCR5-4212 | + | UGUCUGGAGGAAAAAGAAAAAA | 22 | 3655 |
| CCR5-4213 | + | UUGUCUGGAGGAAAAAGAAAAAA | 23 | 3656 |
| CCR5-4214 | + | CUUGUCUGGAGGAAAAAGAAAAAA | 24 | 3657 |
| CCR5-4215 | + | UCUGGAGGAAAAAGAAAA | 18 | 3658 |
| CCR5-4216 | + | GUCUGGAGGAAAAAGAAAA | 19 | 3659 |
| CCR5-4217 | + | UGUCUGGAGGAAAAAGAAAA | 20 | 3660 |
| CCR5-4218 | + | UUGUCUGGAGGAAAAAGAAAA | 21 | 3661 |
| CCR5-4219 | + | CUUGUCUGGAGGAAAAAGAAAA | 22 | 3662 |
| CCR5-4220 | + | UCUUGUCUGGAGGAAAAAGAAAA | 23 | 3663 |
| CCR5-4221 | + | CUCUUGUCUGGAGGAAAAAGAAAA | 24 | 3664 |
| CCR5-4222 | + | CCUCUUGUCUGGAGGAAA | 18 | 3665 |
| CCR5-4223 | + | CCCUCUUGUCUGGAGGAAA | 19 | 3666 |
| CCR5-4224 | + | UCCCUCUUGUCUGGAGGAAA | 20 | 3667 |
| CCR5-4225 | + | UUCCCUCUUGUCUGGAGGAAA | 21 | 3668 |
| CCR5-4226 | + | CUUCCCUCUUGUCUGGAGGAAA | 22 | 3669 |
| CCR5-4227 | + | GCUUCCCUCUUGUCUGGAGGAAA | 23 | 3670 |
| CCR5-4228 | + | GGCUUCCCUCUUGUCUGGAGGAAA | 24 | 3671 |
| CCR5-4229 | + | GAUGUCACCAACCGCCAA | 18 | 3672 |
| CCR5-4230 | + | AGAUGUCACCAACCGCCAA | 19 | 3673 |
| CCR5-4231 | + | CAGAUGUCACCAACCGCCAA | 20 | 3674 |
| CCR5-4232 | + | UCAGAUGUCACCAACCGCCAA | 21 | 3675 |
| CCR5-4233 | + | UUCAGAUGUCACCAACCGCCAA | 22 | 3676 |
| CCR5-4234 | + | UUUCAGAUGUCACCAACCGCCAA | 23 | 3677 |
| CCR5-4235 | + | UUUUCAGAUGUCACCAACCGCCAA | 24 | 3678 |
| CCR5-4236 | + | CAAGGUCACGGAAGCCCA | 18 | 3679 |
| CCR5-4237 | + | CCAAGGUCACGGAAGCCCA | 19 | 3680 |
| CCR5-4238 | + | GCCAAGGUCACGGAAGCCCA | 20 | 3681 |
| CCR5-4239 | + | AGCCAAGGUCACGGAAGCCCA | 21 | 3682 |
| CCR5-4240 | + | GAGCCAAGGUCACGGAAGCCCA | 22 | 3683 |
| CCR5-4241 | + | AGAGCCAAGGUCACGGAAGCCCA | 23 | 3684 |
| CCR5-4242 | + | UAGAGCCAAGGUCACGGAAGCCCA | 24 | 3685 |
| CCR5-4243 | + | AUUCUAGAGCCAAGGUCA | 18 | 3686 |
| CCR5-4244 | + | UAUUCUAGAGCCAAGGUCA | 19 | 3687 |
| CCR5-3069 | + | UUAUUCUAGAGCCAAGGUCA | 20 | 3688 |
| CCR5-4245 | + | UUUAUUCUAGAGCCAAGGUCA | 21 | 3689 |
| CCR5-4246 | + | UUUUAUUCUAGAGCCAAGGUCA | 22 | 3690 |
| CCR5-4247 | + | UUUUUAUUCUAGAGCCAAGGUCA | 23 | 3691 |
| CCR5-4248 | + | CUUUUUAUUCUAGAGCCAAGGUCA | 24 | 3692 |
| CCR5-4249 | + | CCUGGGUCCAGAAAAAGA | 18 | 3693 |
| CCR5-4250 | + | UCCUGGGUCCAGAAAAAGA | 19 | 3694 |
| CCR5-3071 | + | AUCCUGGGUCCAGAAAAAGA | 20 | 3695 |
| CCR5-4251 | + | GAUCCUGGGUCCAGAAAAAGA | 21 | 3696 |
| CCR5-4252 | + | AGAUCCUGGGUCCAGAAAAAGA | 22 | 3697 |
| CCR5-4253 | + | AAGAUCCUGGGUCCAGAAAAAGA | 23 | 3698 |
| CCR5-4254 | + | UAAGAUCCUGGGUCCAGAAAAAGA | 24 | 3699 |
| CCR5-4255 | + | AACAAAAUAGUGAACAGA | 18 | 3700 |
| CCR5-4256 | + | CAACAAAAUAGUGAACAGA | 19 | 3701 |
| CCR5-4257 | + | GCAACAAAAUAGUGAACAGA | 20 | 3702 |
| CCR5-4258 | + | GGCAACAAAAUAGUGAACAGA | 21 | 3703 |
| CCR5-4259 | + | GGGCAACAAAAUAGUGAACAGA | 22 | 3704 |
| CCR5-4260 | + | AGGGCAACAAAAUAGUGAACAGA | 23 | 3705 |
| CCR5-4261 | + | AAGGGCAACAAAAUAGUGAACAGA | 24 | 3706 |
| CCR5-4262 | + | AGAUAGAUUAUAUCUGGA | 18 | 3707 |
| CCR5-4263 | + | CAGAUAGAUUAUAUCUGGA | 19 | 3708 |
| CCR5-4264 | + | UCAGAUAGAUUAUAUCUGGA | 20 | 3709 |
| CCR5-4265 | + | UUCAGAUAGAUUAUAUCUGGA | 21 | 3710 |
| CCR5-4266 | + | CUUCAGAUAGAUUAUAUCUGGA | 22 | 3711 |
| CCR5-4267 | + | GCUUCAGAUAGAUUAUAUCUGGA | 23 | 3712 |
| CCR5-4268 | + | AGCUUCAGAUAGAUUAUAUCUGGA | 24 | 3713 |
| CCR5-4269 | + | CUUAGACUAGGCAGCUGA | 18 | 3714 |
| CCR5-4270 | + | CCUUAGACUAGGCAGCUGA | 19 | 3715 |
| CCR5-4271 | + | ACCUUAGACUAGGCAGCUGA | 20 | 3716 |
| CCR5-4272 | + | CACCUUAGACUAGGCAGCUGA | 21 | 3717 |
| CCR5-4273 | + | GCACCUUAGACUAGGCAGCUGA | 22 | 3718 |
| CCR5-4274 | + | UGCACCUUAGACUAGGCAGCUGA | 23 | 3719 |
| CCR5-4275 | + | CUGCACCUUAGACUAGGCAGCUGA | 24 | 3720 |
| CCR5-4276 | + | UUGAAGGGCAACAAAAUA | 18 | 3721 |
| CCR5-4277 | + | UUUGAAGGGCAACAAAAUA | 19 | 3722 |
| CCR5-4278 | + | GUUUGAAGGGCAACAAAAUA | 20 | 3723 |
| CCR5-4279 | + | GGUUUGAAGGGCAACAAAAUA | 21 | 3724 |
| CCR5-4280 | + | UGGUUUGAAGGGCAACAAAAUA | 22 | 3725 |
| CCR5-4281 | + | CUGGUUUGAAGGGCAACAAAAUA | 23 | 3726 |
| CCR5-4282 | + | ACUGGUUUGAAGGGCAACAAAAUA | 24 | 3727 |
| CCR5-4283 | + | GUAUAUAGUAUAGUCAUA | 18 | 3728 |
| CCR5-4284 | + | UGUAUAUAGUAUAGUCAUA | 19 | 3729 |
| CCR5-4285 | + | CUGUAUAUAGUAUAGUCAUA | 20 | 3730 |
| CCR5-4286 | + | ACUGUAUAUAGUAUAGUCAUA | 21 | 3731 |
| CCR5-4287 | + | GACUGUAUAUAGUAUAGUCAUA | 22 | 3732 |
| CCR5-4288 | + | UGACUGUAUAUAGUAUAGUCAUA | 23 | 3733 |
| CCR5-4289 | + | AUGACUGUAUAUAGUAUAGUCAUA | 24 | 3734 |
| CCR5-4290 | + | CAUGAAACUGAUAUAUUA | 18 | 3735 |
| CCR5-4291 | + | CCAUGAAACUGAUAUAUUA | 19 | 3736 |
| CCR5-4292 | + | GCCAUGAAACUGAUAUAUUA | 20 | 3737 |
| CCR5-4293 | + | UGCCAUGAAACUGAUAUAUUA | 21 | 3738 |
| CCR5-4294 | + | GUGCCAUGAAACUGAUAUAUUA | 22 | 3739 |
| CCR5-4295 | + | UGUGCCAUGAAACUGAUAUAUUA | 23 | 3740 |
| CCR5-4296 | + | CUGUGCCAUGAAACUGAUAUAUUA | 24 | 3741 |
| CCR5-4297 | + | AGUAUAGUCAUAAAGAAC | 18 | 3742 |
| CCR5-4298 | + | UAGUAUAGUCAUAAAGAAC | 19 | 3743 |
| CCR5-4299 | + | AUAGUAUAGUCAUAAAGAAC | 20 | 3744 |
| CCR5-4300 | + | UAUAGUAUAGUCAUAAAGAAC | 21 | 3745 |
| CCR5-4301 | + | AUAUAGUAUAGUCAUAAAGAAC | 22 | 3746 |
| CCR5-4302 | + | UAUAUAGUAUAGUCAUAAAGAAC | 23 | 3747 |
| CCR5-4303 | + | GUAUAUAGUAUAGUCAUAAAGAAC | 24 | 3748 |
| CCR5-4304 | + | CAGCUCUGCUGACAAUAC | 18 | 3749 |
| CCR5-4305 | + | UCAGCUCUGCUGACAAUAC | 19 | 3750 |
| CCR5-4306 | + | CUCAGCUCUGCUGACAAUAC | 20 | 3751 |
| CCR5-4307 | + | UCUCAGCUCUGCUGACAAUAC | 21 | 3752 |
| CCR5-4308 | + | UUCUCAGCUCUGCUGACAAUAC | 22 | 3753 |
| CCR5-4309 | + | CUUCUCAGCUCUGCUGACAAUAC | 23 | 3754 |
| CCR5-4310 | + | UCUUCUCAGCUCUGCUGACAAUAC | 24 | 3755 |
| CCR5-4311 | + | AACCUGUUUAGCUCACCC | 18 | 3756 |
| CCR5-4312 | + | AAACCUGUUUAGCUCACCC | 19 | 3757 |
| CCR5-4313 | + | GAAACCUGUUUAGCUCACCC | 20 | 3758 |
| CCR5-4314 | + | GGAAACCUGUUUAGCUCACCC | 21 | 3759 |
| CCR5-4315 | + | GGGAAACCUGUUUAGCUCACCC | 22 | 3760 |
| CCR5-4316 | + | UGGGAAACCUGUUUAGCUCACCC | 23 | 3761 |
| CCR5-4317 | + | AUGGGAAACCUGUUUAGCUCACCC | 24 | 3762 |
| CCR5-4318 | + | GAGUUGUCAUACAUACCC | 18 | 3763 |
| CCR5-4319 | + | AGAGUUGUCAUACAUACCC | 19 | 3764 |
| CCR5-4320 | + | AAGAGUUGUCAUACAUACCC | 20 | 3765 |
| CCR5-4321 | + | UAAGAGUUGUCAUACAUACCC | 21 | 3766 |
| CCR5-4322 | + | UUAAGAGUUGUCAUACAUACCC | 22 | 3767 |
| CCR5-4323 | + | AUUAAGAGUUGUCAUACAUACCC | 23 | 3768 |
| CCR5-4324 | + | AAUUAAGAGUUGUCAUACAUACCC | 24 | 3769 |
| CCR5-4325 | + | GCAGCUGAGAGAAGCCCC | 18 | 3770 |
| CCR5-4326 | + | GGCAGCUGAGAGAAGCCCC | 19 | 3771 |
| CCR5-4327 | + | AGGCAGCUGAGAGAAGCCCC | 20 | 3772 |
| CCR5-4328 | + | UAGGCAGCUGAGAGAAGCCCC | 21 | 3773 |
| CCR5-4329 | + | CUAGGCAGCUGAGAGAAGCCCC | 22 | 3774 |
| CCR5-4330 | + | ACUAGGCAGCUGAGAGAAGCCCC | 23 | 3775 |
| CCR5-4331 | + | GACUAGGCAGCUGAGAGAAGCCCC | 24 | 3776 |
| CCR5-4332 | + | GCCAAGGUCACGGAAGCC | 18 | 3777 |
| CCR5-4333 | + | AGCCAAGGUCACGGAAGCC | 19 | 3778 |
| CCR5-4334 | + | GAGCCAAGGUCACGGAAGCC | 20 | 3779 |
| CCR5-4335 | + | AGAGCCAAGGUCACGGAAGCC | 21 | 3780 |
| CCR5-4336 | + | UAGAGCCAAGGUCACGGAAGCC | 22 | 3781 |
| CCR5-4337 | + | CUAGAGCCAAGGUCACGGAAGCC | 23 | 3782 |
| CCR5-4338 | + | UCUAGAGCCAAGGUCACGGAAGCC | 24 | 3783 |
| CCR5-4339 | + | CAGAUGUCACCAACCGCC | 18 | 3784 |
| CCR5-4340 | + | UCAGAUGUCACCAACCGCC | 19 | 3785 |
| CCR5-4341 | + | UUCAGAUGUCACCAACCGCC | 20 | 3786 |
| CCR5-4342 | + | UUUCAGAUGUCACCAACCGCC | 21 | 3787 |
| CCR5-4343 | + | UUUUCAGAUGUCACCAACCGCC | 22 | 3788 |
| CCR5-4344 | + | AUUUUCAGAUGUCACCAACCGCC | 23 | 3789 |
| CCR5-4345 | + | GAUUUUCAGAUGUCACCAACCGCC | 24 | 3790 |
| CCR5-4346 | + | UUAUAUACUAACUGUGCC | 18 | 3791 |
| CCR5-4347 | + | AUUAUAUACUAACUGUGCC | 19 | 3792 |
| CCR5-4348 | + | AAUUAUAUACUAACUGUGCC | 20 | 3793 |
| CCR5-4349 | + | GAAUUAUAUACUAACUGUGCC | 21 | 3794 |
| CCR5-4350 | + | AGAAUUAUAUACUAACUGUGCC | 22 | 3795 |
| CCR5-4351 | + | AAGAAUUAUAUACUAACUGUGCC | 23 | 3796 |
| CCR5-4352 | + | AAAGAAUUAUAUACUAACUGUGCC | 24 | 3797 |
| CCR5-4353 | + | CAGAGGGCAUCUUGUGGC | 18 | 3798 |
| CCR5-4354 | + | CCAGAGGGCAUCUUGUGGC | 19 | 3799 |
| CCR5-4355 | + | CCCAGAGGGCAUCUUGUGGC | 20 | 3800 |
| CCR5-4356 | + | GCCCAGAGGGCAUCUUGUGGC | 21 | 3801 |
| CCR5-4357 | + | AGCCCAGAGGGCAUCUUGUGGC | 22 | 3802 |
| CCR5-4358 | + | AAGCCCAGAGGGCAUCUUGUGGC | 23 | 3803 |
| CCR5-4359 | + | GAAGCCCAGAGGGCAUCUUGUGGC | 24 | 3804 |
| CCR5-4360 | + | UAUUCUAGAGCCAAGGUC | 18 | 3805 |
| CCR5-4361 | + | UUAUUCUAGAGCCAAGGUC | 19 | 3806 |
| CCR5-4362 | + | UUUAUUCUAGAGCCAAGGUC | 20 | 3807 |
| CCR5-4363 | + | UUUUAUUCUAGAGCCAAGGUC | 21 | 3808 |
| CCR5-4364 | + | UUUUUAUUCUAGAGCCAAGGUC | 22 | 3809 |
| CCR5-4365 | + | CUUUUUAUUCUAGAGCCAAGGUC | 23 | 3810 |
| CCR5-4366 | + | GCUUUUUAUUCUAGAGCCAAGGUC | 24 | 3811 |
| CCR5-4367 | + | CCACUAAGAUCCUGGGUC | 18 | 3812 |
| CCR5-4368 | + | CCCACUAAGAUCCUGGGUC | 19 | 3813 |
| CCR5-4369 | + | CCCCACUAAGAUCCUGGGUC | 20 | 3814 |
| CCR5-4370 | + | UCCCCACUAAGAUCCUGGGUC | 21 | 3815 |
| CCR5-4371 | + | AUCCCCACUAAGAUCCUGGGUC | 22 | 3816 |
| CCR5-4372 | + | AAUCCCCACUAAGAUCCUGGGUC | 23 | 3817 |
| CCR5-4373 | + | AAAUCCCCACUAAGAUCCUGGGUC | 24 | 3818 |
| CCR5-4374 | + | UUAGGCUUCCCUCUUGUC | 18 | 3819 |
| CCR5-4375 | + | UUUAGGCUUCCCUCUUGUC | 19 | 3820 |
| CCR5-3097 | + | UUUUAGGCUUCCCUCUUGUC | 20 | 3821 |
| CCR5-4376 | + | UUUUUAGGCUUCCCUCUUGUC | 21 | 3822 |
| CCR5-4377 | + | AUUUUUAGGCUUCCCUCUUGUC | 22 | 3823 |
| CCR5-4378 | + | CAUUUUUAGGCUUCCCUCUUGUC | 23 | 3824 |
| CCR5-4379 | + | CCAUUUUUAGGCUUCCCUCUUGUC | 24 | 3825 |
| CCR5-4380 | + | AGCCAAAGCUUUUUAUUC | 18 | 3826 |
| CCR5-4381 | + | AAGCCAAAGCUUUUUAUUC | 19 | 3827 |
| CCR5-4382 | + | CAAGCCAAAGCUUUUUAUUC | 20 | 3828 |
| CCR5-4383 | + | ACAAGCCAAAGCUUUUUAUUC | 21 | 3829 |
| CCR5-4384 | + | CACAAGCCAAAGCUUUUUAUUC | 22 | 3830 |
| CCR5-4385 | + | UCACAAGCCAAAGCUUUUUAUUC | 23 | 3831 |
| CCR5-4386 | + | AUCACAAGCCAAAGCUUUUUAUUC | 24 | 3832 |
| CCR5-4387 | + | UCCUGGGUCCAGAAAAAG | 18 | 3833 |
| CCR5-4388 | + | AUCCUGGGUCCAGAAAAAG | 19 | 3834 |
| CCR5-4389 | + | GAUCCUGGGUCCAGAAAAAG | 20 | 3835 |
| CCR5-4390 | + | AGAUCCUGGGUCCAGAAAAAG | 21 | 3836 |
| CCR5-4391 | + | AAGAUCCUGGGUCCAGAAAAAG | 22 | 3837 |
| CCR5-4392 | + | UAAGAUCCUGGGUCCAGAAAAAG | 23 | 3838 |
| CCR5-4393 | + | CUAAGAUCCUGGGUCCAGAAAAAG | 24 | 3839 |
| CCR5-4394 | + | GCACCUUAGACUAGGCAG | 18 | 3840 |
| CCR5-4395 | + | UGCACCUUAGACUAGGCAG | 19 | 3841 |
| CCR5-4396 | + | CUGCACCUUAGACUAGGCAG | 20 | 3842 |
| CCR5-4397 | + | CCUGCACCUUAGACUAGGCAG | 21 | 3843 |
| CCR5-4398 | + | CCCUGCACCUUAGACUAGGCAG | 22 | 3844 |
| CCR5-4399 | + | UCCCUGCACCUUAGACUAGGCAG | 23 | 3845 |
| CCR5-4400 | + | CUCCCUGCACCUUAGACUAGGCAG | 24 | 3846 |
| CCR5-4401 | + | UAAGUUCAGCUGCUCUAG | 18 | 3847 |
| CCR5-4402 | + | UUAAGUUCAGCUGCUCUAG | 19 | 3848 |
| CCR5-4403 | + | UUUAAGUUCAGCUGCUCUAG | 20 | 3849 |
| CCR5-4404 | + | AUUUAAGUUCAGCUGCUCUAG | 21 | 3850 |
| CCR5-4405 | + | UAUUUAAGUUCAGCUGCUCUAG | 22 | 3851 |
| CCR5-4406 | + | CUAUUUAAGUUCAGCUGCUCUAG | 23 | 3852 |
| CCR5-4407 | + | UCUAUUUAAGUUCAGCUGCUCUAG | 24 | 3853 |
| CCR5-4408 | + | AUGAAACUGAUAUAUUAG | 18 | 3854 |
| CCR5-4409 | + | CAUGAAACUGAUAUAUUAG | 19 | 3855 |
| CCR5-3105 | + | CCAUGAAACUGAUAUAUUAG | 20 | 3856 |
| CCR5-4410 | + | GCCAUGAAACUGAUAUAUUAG | 21 | 3857 |
| CCR5-4411 | + | UGCCAUGAAACUGAUAUAUUAG | 22 | 3858 |
| CCR5-4412 | + | GUGCCAUGAAACUGAUAUAUUAG | 23 | 3859 |
| CCR5-4413 | + | UGUGCCAUGAAACUGAUAUAUUAG | 24 | 3860 |
| CCR5-4414 | + | GGCUUCCCUCUUGUCUGG | 18 | 3861 |
| CCR5-4415 | + | AGGCUUCCCUCUUGUCUGG | 19 | 3862 |
| CCR5-3108 | + | UAGGCUUCCCUCUUGUCUGG | 20 | 3863 |
| CCR5-4416 | + | UUAGGCUUCCCUCUUGUCUGG | 21 | 3864 |
| CCR5-4417 | + | UUUAGGCUUCCCUCUUGUCUGG | 22 | 3865 |
| CCR5-4418 | + | UUUUAGGCUUCCCUCUUGUCUGG | 23 | 3866 |
| CCR5-4419 | + | UUUUUAGGCUUCCCUCUUGUCUGG | 24 | 3867 |
| CCR5-4420 | + | CCAUAUACUUAUGUCAUG | 18 | 3868 |
| CCR5-4421 | + | ACCAUAUACUUAUGUCAUG | 19 | 3869 |
| CCR5-3111 | + | GACCAUAUACUUAUGUCAUG | 20 | 3870 |
| CCR5-4422 | + | UGACCAUAUACUUAUGUCAUG | 21 | 3871 |
| CCR5-4423 | + | UUGACCAUAUACUUAUGUCAUG | 22 | 3872 |
| CCR5-4424 | + | CUUGACCAUAUACUUAUGUCAUG | 23 | 3873 |
| CCR5-4425 | + | ACUUGACCAUAUACUUAUGUCAUG | 24 | 3874 |
| CCR5-4426 | + | AGGCUUCCCUCUUGUCUG | 18 | 3875 |
| CCR5-4427 | + | UAGGCUUCCCUCUUGUCUG | 19 | 3876 |
| CCR5-4428 | + | UUAGGCUUCCCUCUUGUCUG | 20 | 3877 |
| CCR5-4429 | + | UUUAGGCUUCCCUCUUGUCUG | 21 | 3878 |
| CCR5-4430 | + | UUUUAGGCUUCCCUCUUGUCUG | 22 | 3879 |
| CCR5-4431 | + | UUUUUAGGCUUCCCUCUUGUCUG | 23 | 3880 |
| CCR5-4432 | + | AUUUUUAGGCUUCCCUCUUGUCUG | 24 | 3881 |
| CCR5-4433 | + | UAAAUGCUUACUGGUUUG | 18 | 3882 |
| CCR5-4434 | + | AUAAAUGCUUACUGGUUUG | 19 | 3883 |
| CCR5-4435 | + | CAUAAAUGCUUACUGGUUUG | 20 | 3884 |
| CCR5-4436 | + | UCAUAAAUGCUUACUGGUUUG | 21 | 3885 |
| CCR5-4437 | + | CUCAUAAAUGCUUACUGGUUUG | 22 | 3886 |
| CCR5-4438 | + | CCUCAUAAAUGCUUACUGGUUUG | 23 | 3887 |
| CCR5-4439 | + | UCCUCAUAAAUGCUUACUGGUUUG | 24 | 3888 |
| CCR5-4440 | + | ACCAUAUACUUAUGUCAU | 18 | 3889 |
| CCR5-4441 | + | GACCAUAUACUUAUGUCAU | 19 | 3890 |
| CCR5-4442 | + | UGACCAUAUACUUAUGUCAU | 20 | 3891 |
| CCR5-4443 | + | UUGACCAUAUACUUAUGUCAU | 21 | 3892 |
| CCR5-4444 | + | CUUGACCAUAUACUUAUGUCAU | 22 | 3893 |
| CCR5-4445 | + | ACUUGACCAUAUACUUAUGUCAU | 23 | 3894 |
| CCR5-4446 | + | AACUUGACCAUAUACUUAUGUCAU | 24 | 3895 |
| CCR5-4447 | + | CUGGGUCCAGAAAAAGAU | 18 | 3896 |
| CCR5-4448 | + | CCUGGGUCCAGAAAAAGAU | 19 | 3897 |
| CCR5-3122 | + | UCCUGGGUCCAGAAAAAGAU | 20 | 3898 |
| CCR5-4449 | + | AUCCUGGGUCCAGAAAAAGAU | 21 | 3899 |
| CCR5-4450 | + | GAUCCUGGGUCCAGAAAAAGAU | 22 | 3900 |
| CCR5-4451 | + | AGAUCCUGGGUCCAGAAAAAGAU | 23 | 3901 |
| CCR5-4452 | + | AAGAUCCUGGGUCCAGAAAAAGAU | 24 | 3902 |
| CCR5-4453 | + | GCCAUGAAACUGAUAUAU | 18 | 3903 |
| CCR5-4454 | + | UGCCAUGAAACUGAUAUAU | 19 | 3904 |
| CCR5-4455 | + | GUGCCAUGAAACUGAUAUAU | 20 | 3905 |
| CCR5-4456 | + | UGUGCCAUGAAACUGAUAUAU | 21 | 3906 |
| CCR5-4457 | + | CUGUGCCAUGAAACUGAUAUAU | 22 | 3907 |
| CCR5-4458 | + | ACUGUGCCAUGAAACUGAUAUAU | 23 | 3908 |
| CCR5-4459 | + | AACUGUGCCAUGAAACUGAUAUAU | 24 | 3909 |
| CCR5-4460 | + | GCUUCAGAUAGAUUAUAU | 18 | 3910 |
| CCR5-4461 | + | AGCUUCAGAUAGAUUAUAU | 19 | 3911 |
| CCR5-4462 | + | UAGCUUCAGAUAGAUUAUAU | 20 | 3912 |
| CCR5-4463 | + | AUAGCUUCAGAUAGAUUAUAU | 21 | 3913 |
| CCR5-4464 | + | CAUAGCUUCAGAUAGAUUAUAU | 22 | 3914 |
| CCR5-4465 | + | UCAUAGCUUCAGAUAGAUUAUAU | 23 | 3915 |
| CCR5-4466 | + | CUCAUAGCUUCAGAUAGAUUAUAU | 24 | 3916 |
| CCR5-4467 | + | ACCUUAGACUAGGCAGCU | 18 | 3917 |
| CCR5-4468 | + | CACCUUAGACUAGGCAGCU | 19 | 3918 |
| CCR5-4469 | + | GCACCUUAGACUAGGCAGCU | 20 | 3919 |
| CCR5-4470 | + | UGCACCUUAGACUAGGCAGCU | 21 | 3920 |
| CCR5-4471 | + | CUGCACCUUAGACUAGGCAGCU | 22 | 3921 |
| CCR5-4472 | + | CCUGCACCUUAGACUAGGCAGCU | 23 | 3922 |
| CCR5-4473 | + | CCCUGCACCUUAGACUAGGCAGCU | 24 | 3923 |
| CCR5-4474 | + | AGAGGGCAUCUUGUGGCU | 18 | 3924 |
| CCR5-4475 | + | CAGAGGGCAUCUUGUGGCU | 19 | 3925 |
| CCR5-3129 | + | CCAGAGGGCAUCUUGUGGCU | 20 | 3926 |
| CCR5-4476 | + | CCCAGAGGGCAUCUUGUGGCU | 21 | 3927 |
| CCR5-4477 | + | GCCCAGAGGGCAUCUUGUGGCU | 22 | 3928 |
| CCR5-4478 | + | AGCCCAGAGGGCAUCUUGUGGCU | 23 | 3929 |
| CCR5-4479 | + | AAGCCCAGAGGGCAUCUUGUGGCU | 24 | 3930 |
| CCR5-4480 | + | GGGUCUCAUUUGCCUUCU | 18 | 3931 |
| CCR5-4481 | + | GGGGUCUCAUUUGCCUUCU | 19 | 3932 |
| CCR5-4482 | + | UGGGGUCUCAUUUGCCUUCU | 20 | 3933 |
| CCR5-4483 | + | UUGGGGUCUCAUUUGCCUUCU | 21 | 3934 |
| CCR5-4484 | + | UUUGGGGUCUCAUUUGCCUUCU | 22 | 3935 |
| CCR5-4485 | + | GUUUGGGGUCUCAUUUGCCUUCU | 23 | 3936 |
| CCR5-4486 | + | UGUUUGGGGUCUCAUUUGCCUUCU | 24 | 3937 |
| CCR5-4487 | + | AAAAUCCUCACAUUUUCU | 18 | 3938 |
| CCR5-4488 | + | UAAAAUCCUCACAUUUUCU | 19 | 3939 |
| CCR5-4489 | + | GUAAAAUCCUCACAUUUUCU | 20 | 3940 |
| CCR5-4490 | + | UGUAAAAUCCUCACAUUUUCU | 21 | 3941 |
| CCR5-4491 | + | UUGUAAAAUCCUCACAUUUUCU | 22 | 3942 |
| CCR5-4492 | + | AUUGUAAAAUCCUCACAUUUUCU | 23 | 3943 |
| CCR5-4493 | + | AAUUGUAAAAUCCUCACAUUUUCU | 24 | 3944 |
| CCR5-4494 | + | UCAUAAAUGCUUACUGGU | 18 | 3945 |
| CCR5-4495 | + | CUCAUAAAUGCUUACUGGU | 19 | 3946 |
| CCR5-4496 | + | CCUCAUAAAUGCUUACUGGU | 20 | 3947 |
| CCR5-4497 | + | UCCUCAUAAAUGCUUACUGGU | 21 | 3948 |
| CCR5-4498 | + | GUCCUCAUAAAUGCUUACUGGU | 22 | 3949 |
| CCR5-4499 | + | AGUCCUCAUAAAUGCUUACUGGU | 23 | 3950 |
| CCR5-4500 | + | GAGUCCUCAUAAAUGCUUACUGGU | 24 | 3951 |
| CCR5-4501 | + | GGCACGUAAUUUUGCUGU | 18 | 3952 |
| CCR5-4502 | + | GGGCACGUAAUUUUGCUGU | 19 | 3953 |
| CCR5-4503 | + | GGGGCACGUAAUUUUGCUGU | 20 | 3954 |
| CCR5-4504 | + | GGGGGCACGUAAUUUUGCUGU | 21 | 3955 |
| CCR5-4505 | + | UGGGGGCACGUAAUUUUGCUGU | 22 | 3956 |
| CCR5-4506 | + | UUGGGGGCACGUAAUUUUGCUGU | 23 | 3957 |
| CCR5-4507 | + | AUUGGGGGCACGUAAUUUUGCUGU | 24 | 3958 |
| CCR5-4508 | + | UUUAGGCUUCCCUCUUGU | 18 | 3959 |
| CCR5-4509 | + | UUUUAGGCUUCCCUCUUGU | 19 | 3960 |
| CCR5-4510 | + | UUUUUAGGCUUCCCUCUUGU | 20 | 3961 |
| CCR5-4511 | + | AUUUUUAGGCUUCCCUCUUGU | 21 | 3962 |
| CCR5-4512 | + | CAUUUUUAGGCUUCCCUCUUGU | 22 | 3963 |
| CCR5-4513 | + | CCAUUUUUAGGCUUCCCUCUUGU | 23 | 3964 |
| CCR5-4514 | + | ACCAUUUUUAGGCUUCCCUCUUGU | 24 | 3965 |
| CCR5-4515 | + | AAAAGCUCAUUUUUAAUU | 18 | 3966 |
| CCR5-4516 | + | GAAAAGCUCAUUUUUAAUU | 19 | 3967 |
| CCR5-4517 | + | AGAAAAGCUCAUUUUUAAUU | 20 | 3968 |
| CCR5-4518 | + | UAGAAAAGCUCAUUUUUAAUU | 21 | 3969 |
| CCR5-4519 | + | CUAGAAAAGCUCAUUUUUAAUU | 22 | 3970 |
| CCR5-4520 | + | CCUAGAAAAGCUCAUUUUUAAUU | 23 | 3971 |
| CCR5-4521 | + | CCCUAGAAAAGCUCAUUUUUAAUU | 24 | 3972 |
| CCR5-4522 | + | ACUUAGACACAACUUCUU | 18 | 3973 |
| CCR5-4523 | + | GACUUAGACACAACUUCUU | 19 | 3974 |
| CCR5-4524 | + | AGACUUAGACACAACUUCUU | 20 | 3975 |
| CCR5-4525 | + | CAGACUUAGACACAACUUCUU | 21 | 3976 |
| CCR5-4526 | + | CCAGACUUAGACACAACUUCUU | 22 | 3977 |
| CCR5-4527 | + | ACCAGACUUAGACACAACUUCUU | 23 | 3978 |
| CCR5-4528 | + | AACCAGACUUAGACACAACUUCUU | 24 | 3979 |
| CCR5-4529 | − | UAUGGUUCAAAAUUAAAA | 18 | 3980 |
| CCR5-4530 | − | UUAUGGUUCAAAAUUAAAA | 19 | 3981 |
| CCR5-4531 | − | UUUAUGGUUCAAAAUUAAAA | 20 | 3982 |
| CCR5-4532 | − | CUUUAUGGUUCAAAAUUAAAA | 21 | 3983 |
| CCR5-4533 | − | UCUUUAUGGUUCAAAAUUAAAA | 22 | 3984 |
| CCR5-4534 | − | UUCUUUAUGGUUCAAAAUUAAAA | 23 | 3985 |
| CCR5-4535 | − | AUUCUUUAUGGUUCAAAAUUAAAA | 24 | 3986 |
| CCR5-4536 | − | UCUUUUUCCUCCAGACAA | 18 | 3987 |
| CCR5-4537 | − | UUCUUUUUCCUCCAGACAA | 19 | 3988 |
| CCR5-4538 | − | UUUCUUUUUCCUCCAGACAA | 20 | 3989 |
| CCR5-4539 | − | UUUUCUUUUUCCUCCAGACAA | 21 | 3990 |
| CCR5-4540 | − | UUUUUCUUUUUCCUCCAGACAA | 22 | 3991 |
| CCR5-4541 | − | UUUUUUCUUUUUCCUCCAGACAA | 23 | 3992 |
| CCR5-4542 | − | CUUUUUUCUUUUUCCUCCAGACAA | 24 | 3993 |
| CCR5-4543 | − | UGAUCUCUAAGAAGGCAA | 18 | 3994 |
| CCR5-4544 | − | GUGAUCUCUAAGAAGGCAA | 19 | 3995 |
| CCR5-4545 | − | UGUGAUCUCUAAGAAGGCAA | 20 | 3996 |
| CCR5-4546 | − | UUGUGAUCUCUAAGAAGGCAA | 21 | 3997 |
| CCR5-4547 | − | CUUGUGAUCUCUAAGAAGGCAA | 22 | 3998 |
| CCR5-4548 | − | GCUUGUGAUCUCUAAGAAGGCAA | 23 | 3999 |
| CCR5-4549 | − | GGCUUGUGAUCUCUAAGAAGGCAA | 24 | 4000 |
| CCR5-4550 | − | ACUCACAGGGUUUAAUAA | 18 | 4001 |
| CCR5-4551 | − | GACUCACAGGGUUUAAUAA | 19 | 4002 |
| CCR5-4552 | − | AGACUCACAGGGUUUAAUAA | 20 | 4003 |
| CCR5-4553 | − | GAGACUCACAGGGUUUAAUAA | 21 | 4004 |
| CCR5-4554 | − | UGAGACUCACAGGGUUUAAUAA | 22 | 4005 |
| CCR5-4555 | − | UUGAGACUCACAGGGUUUAAUAA | 23 | 4006 |
| CCR5-4556 | − | UUUGAGACUCACAGGGUUUAAUAA | 24 | 4007 |
| CCR5-4557 | − | AGAGCUGAGAAGACAGCA | 18 | 4008 |
| CCR5-4558 | − | CAGAGCUGAGAAGACAGCA | 19 | 4009 |
| CCR5-4559 | − | GCAGAGCUGAGAAGACAGCA | 20 | 4010 |
| CCR5-4560 | − | AGCAGAGCUGAGAAGACAGCA | 21 | 4011 |
| CCR5-4561 | − | CAGCAGAGCUGAGAAGACAGCA | 22 | 4012 |
| CCR5-4562 | − | UCAGCAGAGCUGAGAAGACAGCA | 23 | 4013 |
| CCR5-4563 | − | GUCAGCAGAGCUGAGAAGACAGCA | 24 | 4014 |
| CCR5-4564 | − | CUACAAACACAAACUUCA | 18 | 4015 |
| CCR5-4565 | − | ACUACAAACACAAACUUCA | 19 | 4016 |
| CCR5-4566 | − | AACUACAAACACAAACUUCA | 20 | 4017 |
| CCR5-4567 | − | AAACUACAAACACAAACUUCA | 21 | 4018 |
| CCR5-4568 | − | GAAACUACAAACACAAACUUCA | 22 | 4019 |
| CCR5-4569 | − | AGAAACUACAAACACAAACUUCA | 23 | 4020 |
| CCR5-4570 | − | CAGAAACUACAAACACAAACUUCA | 24 | 4021 |
| CCR5-4571 | − | UUUUUCCUCCAGACAAGA | 18 | 4022 |
| CCR5-4572 | − | CUUUUUCCUCCAGACAAGA | 19 | 4023 |
| CCR5-3072 | − | UCUUUUUCCUCCAGACAAGA | 20 | 4024 |
| CCR5-4573 | − | UUCUUUUUCCUCCAGACAAGA | 21 | 4025 |
| CCR5-4574 | − | UUUCUUUUUCCUCCAGACAAGA | 22 | 4026 |
| CCR5-4575 | − | UUUUCUUUUUCCUCCAGACAAGA | 23 | 4027 |
| CCR5-4576 | − | UUUUUCUUUUUCCUCCAGACAAGA | 24 | 4028 |
| CCR5-4577 | − | UACGUGCCCCCAAUCCUA | 18 | 4029 |
| CCR5-4578 | − | UUACGUGCCCCCAAUCCUA | 19 | 4030 |
| CCR5-4579 | − | AUUACGUGCCCCCAAUCCUA | 20 | 4031 |
| CCR5-4580 | − | AAUUACGUGCCCCCAAUCCUA | 21 | 4032 |
| CCR5-4581 | − | AAAUUACGUGCCCCCAAUCCUA | 22 | 4033 |
| CCR5-4582 | − | AAAAUUACGUGCCCCCAAUCCUA | 23 | 4034 |
| CCR5-4583 | − | CAAAAUUACGUGCCCCCAAUCCUA | 24 | 4035 |
| CCR5-4584 | − | UCUGGACCCAGGAUCUUA | 18 | 4036 |
| CCR5-4585 | − | UUCUGGACCCAGGAUCUUA | 19 | 4037 |
| CCR5-4586 | − | UUUCUGGACCCAGGAUCUUA | 20 | 4038 |
| CCR5-4587 | − | UUUUCUGGACCCAGGAUCUUA | 21 | 4039 |
| CCR5-4588 | − | UUUUUCUGGACCCAGGAUCUUA | 22 | 4040 |
| CCR5-4589 | − | CUUUUUCUGGACCCAGGAUCUUA | 23 | 4041 |
| CCR5-4590 | − | UCUUUUUCUGGACCCAGGAUCUUA | 24 | 4042 |
| CCR5-4591 | − | UUUCUUUUUCCUCCAGAC | 18 | 4043 |
| CCR5-4592 | − | UUUUCUUUUUCCUCCAGAC | 19 | 4044 |
| CCR5-4593 | − | UUUUUCUUUUUCCUCCAGAC | 20 | 4045 |
| CCR5-4594 | − | UUUUUUCUUUUUCCUCCAGAC | 21 | 4046 |
| CCR5-4595 | − | CUUUUUUCUUUUUCCUCCAGAC | 22 | 4047 |
| CCR5-4596 | − | UCUUUUUUCUUUUUCCUCCAGAC | 23 | 4048 |
| CCR5-4597 | − | CUCUUUUUUCUUUUUCCUCCAGAC | 24 | 4049 |
| CCR5-4598 | − | GUCAUCUAUGACCUUCCC | 18 | 4050 |
| CCR5-4599 | − | UGUCAUCUAUGACCUUCCC | 19 | 4051 |
| CCR5-3087 | − | UUGUCAUCUAUGACCUUCCC | 20 | 4052 |
| CCR5-4600 | − | GUUGUCAUCUAUGACCUUCCC | 21 | 4053 |
| CCR5-4601 | − | UGUUGUCAUCUAUGACCUUCCC | 22 | 4054 |
| CCR5-4602 | − | CUGUUGUCAUCUAUGACCUUCCC | 23 | 4055 |
| CCR5-4603 | − | GCUGUUGUCAUCUAUGACCUUCCC | 24 | 4056 |
| CCR5-4604 | − | UGUCAUCUAUGACCUUCC | 18 | 4057 |
| CCR5-4605 | − | UUGUCAUCUAUGACCUUCC | 19 | 4058 |
| CCR5-4606 | − | GUUGUCAUCUAUGACCUUCC | 20 | 4059 |
| CCR5-4607 | − | UGUUGUCAUCUAUGACCUUCC | 21 | 4060 |
| CCR5-4608 | − | CUGUUGUCAUCUAUGACCUUCC | 22 | 4061 |
| CCR5-4609 | − | GCUGUUGUCAUCUAUGACCUUCC | 23 | 4062 |
| CCR5-4610 | − | GGCUGUUGUCAUCUAUGACCUUCC | 24 | 4063 |
| CCR5-4611 | − | UAAGAGAAAAUUCUCAGC | 18 | 4064 |
| CCR5-4612 | − | AUAAGAGAAAAUUCUCAGC | 19 | 4065 |
| CCR5-4613 | − | AAUAAGAGAAAAUUCUCAGC | 20 | 4066 |
| CCR5-4614 | − | UAAUAAGAGAAAAUUCUCAGC | 21 | 4067 |
| CCR5-4615 | − | UUAAUAAGAGAAAAUUCUCAGC | 22 | 4068 |
| CCR5-4616 | − | UUUAAUAAGAGAAAAUUCUCAGC | 23 | 4069 |
| CCR5-4617 | − | GUUUAAUAAGAGAAAAUUCUCAGC | 24 | 4070 |
| CCR5-4618 | − | CUGCCUAGUCUAAGGUGC | 18 | 4071 |
| CCR5-4619 | − | GCUGCCUAGUCUAAGGUGC | 19 | 4072 |
| CCR5-3091 | − | AGCUGCCUAGUCUAAGGUGC | 20 | 4073 |
| CCR5-4620 | − | CAGCUGCCUAGUCUAAGGUGC | 21 | 4074 |
| CCR5-4621 | − | UCAGCUGCCUAGUCUAAGGUGC | 22 | 4075 |
| CCR5-4622 | − | CUCAGCUGCCUAGUCUAAGGUGC | 23 | 4076 |
| CCR5-4623 | − | UCUCAGCUGCCUAGUCUAAGGUGC | 24 | 4077 |
| CCR5-4624 | − | GACAGCAGAGAGCUACUC | 18 | 4078 |
| CCR5-4625 | − | AGACAGCAGAGAGCUACUC | 19 | 4079 |
| CCR5-4626 | − | AAGACAGCAGAGAGCUACUC | 20 | 4080 |
| CCR5-4627 | − | GAAGACAGCAGAGAGCUACUC | 21 | 4081 |
| CCR5-4628 | − | AGAAGACAGCAGAGAGCUACUC | 22 | 4082 |
| CCR5-4629 | − | GAGAAGACAGCAGAGAGCUACUC | 23 | 4083 |
| CCR5-4630 | − | UGAGAAGACAGCAGAGAGCUACUC | 24 | 4084 |
| CCR5-4631 | − | AUUAAAAAUGAGCUUUUC | 18 | 4085 |
| CCR5-4632 | − | AAUUAAAAAUGAGCUUUUC | 19 | 4086 |
| CCR5-4633 | − | AAAUUAAAAAUGAGCUUUUC | 20 | 4087 |
| CCR5-4634 | − | AAAAUUAAAAAUGAGCUUUUC | 21 | 4088 |
| CCR5-4635 | − | CAAAAUUAAAAAUGAGCUUUUC | 22 | 4089 |
| CCR5-4636 | − | UCAAAAUUAAAAAUGAGCUUUUC | 23 | 4090 |
| CCR5-4637 | − | UUCAAAAUUAAAAAUGAGCUUUUC | 24 | 4091 |
| CCR5-4638 | − | CUUUUUCCUCCAGACAAG | 18 | 4092 |
| CCR5-4639 | − | UCUUUUUCCUCCAGACAAG | 19 | 4093 |
| CCR5-3101 | − | UUCUUUUUCCUCCAGACAAG | 20 | 4094 |
| CCR5-4640 | − | UUUCUUUUUCCUCCAGACAAG | 21 | 4095 |
| CCR5-4641 | − | UUUUCUUUUUCCUCCAGACAAG | 22 | 4096 |
| CCR5-4642 | − | UUUUUCUUUUUCCUCCAGACAAG | 23 | 4097 |
| CCR5-4643 | − | UUUUUUCUUUUUCCUCCAGACAAG | 24 | 4098 |
| CCR5-4644 | − | GCAGAGCUGAGAAGACAG | 18 | 4099 |
| CCR5-4645 | − | AGCAGAGCUGAGAAGACAG | 19 | 4100 |
| CCR5-4646 | − | CAGCAGAGCUGAGAAGACAG | 20 | 4101 |
| CCR5-4647 | − | UCAGCAGAGCUGAGAAGACAG | 21 | 4102 |
| CCR5-4648 | − | GUCAGCAGAGCUGAGAAGACAG | 22 | 4103 |
| CCR5-4649 | − | UGUCAGCAGAGCUGAGAAGACAG | 23 | 4104 |
| CCR5-4650 | − | UUGUCAGCAGAGCUGAGAAGACAG | 24 | 4105 |
| CCR5-4651 | − | AAUUCUCAGCUAGAGCAG | 18 | 4106 |
| CCR5-4652 | − | AAAUUCUCAGCUAGAGCAG | 19 | 4107 |
| CCR5-4653 | − | AAAAUUCUCAGCUAGAGCAG | 20 | 4108 |
| CCR5-4654 | − | GAAAAUUCUCAGCUAGAGCAG | 21 | 4109 |
| CCR5-4655 | − | AGAAAAUUCUCAGCUAGAGCAG | 22 | 4110 |
| CCR5-4656 | − | GAGAAAAUUCUCAGCUAGAGCAG | 23 | 4111 |
| CCR5-4657 | − | AGAGAAAAUUCUCAGCUAGAGCAG | 24 | 4112 |
| CCR5-4658 | − | AUUCAUCUGUGGUGGCAG | 18 | 4113 |
| CCR5-4659 | − | CAUUCAUCUGUGGUGGCAG | 19 | 4114 |
| CCR5-4660 | − | ACAUUCAUCUGUGGUGGCAG | 20 | 4115 |
| CCR5-4661 | − | GACAUUCAUCUGUGGUGGCAG | 21 | 4116 |
| CCR5-4662 | − | UGACAUUCAUCUGUGGUGGCAG | 22 | 4117 |
| CCR5-4663 | − | AUGACAUUCAUCUGUGGUGGCAG | 23 | 4118 |
| CCR5-4664 | − | CAUGACAUUCAUCUGUGGUGGCAG | 24 | 4119 |
| CCR5-4665 | − | AAUCUCAAGUAUUGUCAG | 18 | 4120 |
| CCR5-4666 | − | AAAUCUCAAGUAUUGUCAG | 19 | 4121 |
| CCR5-4667 | − | AAAAUCUCAAGUAUUGUCAG | 20 | 4122 |
| CCR5-4668 | − | GAAAAUCUCAAGUAUUGUCAG | 21 | 4123 |
| CCR5-4669 | − | UGAAAAUCUCAAGUAUUGUCAG | 22 | 4124 |
| CCR5-4670 | − | CUGAAAAUCUCAAGUAUUGUCAG | 23 | 4125 |
| CCR5-4671 | − | UCUGAAAAUCUCAAGUAUUGUCAG | 24 | 4126 |
| CCR5-4672 | − | CAAGUAUUGUCAGCAGAG | 18 | 4127 |
| CCR5-4673 | − | UCAAGUAUUGUCAGCAGAG | 19 | 4128 |
| CCR5-4674 | − | CUCAAGUAUUGUCAGCAGAG | 20 | 4129 |
| CCR5-4675 | − | UCUCAAGUAUUGUCAGCAGAG | 21 | 4130 |
| CCR5-4676 | − | AUCUCAAGUAUUGUCAGCAGAG | 22 | 4131 |
| CCR5-4677 | − | AAUCUCAAGUAUUGUCAGCAGAG | 23 | 4132 |
| CCR5-4678 | − | AAAUCUCAAGUAUUGUCAGCAGAG | 24 | 4133 |
| CCR5-4679 | − | CUGGACCCAGGAUCUUAG | 18 | 4134 |
| CCR5-4680 | − | UCUGGACCCAGGAUCUUAG | 19 | 4135 |
| CCR5-3106 | − | UUCUGGACCCAGGAUCUUAG | 20 | 4136 |
| CCR5-4681 | − | UUUCUGGACCCAGGAUCUUAG | 21 | 4137 |
| CCR5-4682 | − | UUUUCUGGACCCAGGAUCUUAG | 22 | 4138 |
| CCR5-4683 | − | UUUUUCUGGACCCAGGAUCUUAG | 23 | 4139 |
| CCR5-4684 | − | CUUUUUCUGGACCCAGGAUCUUAG | 24 | 4140 |
| CCR5-4685 | − | UUAACUAUGGGCUCACGG | 18 | 4141 |
| CCR5-4686 | − | UUUAACUAUGGGCUCACGG | 19 | 4142 |
| CCR5-4687 | − | UUUUAACUAUGGGCUCACGG | 20 | 4143 |
| CCR5-4688 | − | GUUUUAACUAUGGGCUCACGG | 21 | 4144 |
| CCR5-4689 | − | AGUUUUAACUAUGGGCUCACGG | 22 | 4145 |
| CCR5-4690 | − | GAGUUUUAACUAUGGGCUCACGG | 23 | 4146 |
| CCR5-4691 | − | AGAGUUUUAACUAUGGGCUCACGG | 24 | 4147 |
| CCR5-4692 | − | GCUGCCUAGUCUAAGGUG | 18 | 4148 |
| CCR5-4693 | − | AGCUGCCUAGUCUAAGGUG | 19 | 4149 |
| CCR5-4694 | − | CAGCUGCCUAGUCUAAGGUG | 20 | 4150 |
| CCR5-4695 | − | UCAGCUGCCUAGUCUAAGGUG | 21 | 4151 |
| CCR5-4696 | − | CUCAGCUGCCUAGUCUAAGGUG | 22 | 4152 |
| CCR5-4697 | − | UCUCAGCUGCCUAGUCUAAGGUG | 23 | 4153 |
| CCR5-4698 | − | CUCUCAGCUGCCUAGUCUAAGGUG | 24 | 4154 |
| CCR5-4699 | − | ACAAACUUCACAGAAAAU | 18 | 4155 |
| CCR5-4700 | − | CACAAACUUCACAGAAAAU | 19 | 4156 |
| CCR5-4701 | − | ACACAAACUUCACAGAAAAU | 20 | 4157 |
| CCR5-4702 | − | AACACAAACUUCACAGAAAAU | 21 | 4158 |
| CCR5-4703 | − | AAACACAAACUUCACAGAAAAU | 22 | 4159 |
| CCR5-4704 | − | CAAACACAAACUUCACAGAAAAU | 23 | 4160 |
| CCR5-4705 | − | ACAAACACAAACUUCACAGAAAAU | 24 | 4161 |
| CCR5-4706 | − | AGACUCACAGGGUUUAAU | 18 | 4162 |
| CCR5-4707 | − | GAGACUCACAGGGUUUAAU | 19 | 4163 |
| CCR5-4708 | − | UGAGACUCACAGGGUUUAAU | 20 | 4164 |
| CCR5-4709 | − | UUGAGACUCACAGGGUUUAAU | 21 | 4165 |
| CCR5-4710 | − | UUUGAGACUCACAGGGUUUAAU | 22 | 4166 |
| CCR5-4711 | − | GUUUGAGACUCACAGGGUUUAAU | 23 | 4167 |
| CCR5-4712 | − | AGUUUGAGACUCACAGGGUUUAAU | 24 | 4168 |
| CCR5-4713 | − | CUUGGCGGUUGGUGACAU | 18 | 4169 |
| CCR5-4714 | − | UCUUGGCGGUUGGUGACAU | 19 | 4170 |
| CCR5-4715 | − | CUCUUGGCGGUUGGUGACAU | 20 | 4171 |
| CCR5-4716 | − | UCUCUUGGCGGUUGGUGACAU | 21 | 4172 |
| CCR5-4717 | − | CUCUCUUGGCGGUUGGUGACAU | 22 | 4173 |
| CCR5-4718 | − | GCUCUCUUGGCGGUUGGUGACAU | 23 | 4174 |
| CCR5-4719 | − | AGCUCUCUUGGCGGUUGGUGACAU | 24 | 4175 |
| CCR5-4720 | − | UAAUCUAUCUGAAGCUAU | 18 | 4176 |
| CCR5-4721 | − | AUAAUCUAUCUGAAGCUAU | 19 | 4177 |
| CCR5-4722 | − | UAUAAUCUAUCUGAAGCUAU | 20 | 4178 |
| CCR5-4723 | − | AUAUAAUCUAUCUGAAGCUAU | 21 | 4179 |
| CCR5-4724 | − | GAUAUAAUCUAUCUGAAGCUAU | 22 | 4180 |
| CCR5-4725 | − | AGAUAUAAUCUAUCUGAAGCUAU | 23 | 4181 |
| CCR5-4726 | − | CAGAUAUAAUCUAUCUGAAGCUAU | 24 | 4182 |
| CCR5-4727 | − | ACUCCAGAUAUAAUCUAU | 18 | 4183 |
| CCR5-4728 | − | CACUCCAGAUAUAAUCUAU | 19 | 4184 |
| CCR5-4729 | − | UCACUCCAGAUAUAAUCUAU | 20 | 4185 |
| CCR5-4730 | − | UUCACUCCAGAUAUAAUCUAU | 21 | 4186 |
| CCR5-4731 | − | CUUCACUCCAGAUAUAAUCUAU | 22 | 4187 |
| CCR5-4732 | − | UCUUCACUCCAGAUAUAAUCUAU | 23 | 4188 |
| CCR5-4733 | − | UUCUUCACUCCAGAUAUAAUCUAU | 24 | 4189 |
| CCR5-4734 | − | AAACCAGUAAGCAUUUAU | 18 | 4190 |
| CCR5-4735 | − | CAAACCAGUAAGCAUUUAU | 19 | 4191 |
| CCR5-4736 | − | UCAAACCAGUAAGCAUUUAU | 20 | 4192 |
| CCR5-4737 | − | UUCAAACCAGUAAGCAUUUAU | 21 | 4193 |
| CCR5-4738 | − | CUUCAAACCAGUAAGCAUUUAU | 22 | 4194 |
| CCR5-4739 | − | CCUUCAAACCAGUAAGCAUUUAU | 23 | 4195 |
| CCR5-4740 | − | CCCUUCAAACCAGUAAGCAUUUAU | 24 | 4196 |
| CCR5-4741 | − | CUCUUAAUUGUGGCAACU | 18 | 4197 |
| CCR5-4742 | − | ACUCUUAAUUGUGGCAACU | 19 | 4198 |
| CCR5-4743 | − | AACUCUUAAUUGUGGCAACU | 20 | 4199 |
| CCR5-4744 | − | CAACUCUUAAUUGUGGCAACU | 21 | 4200 |
| CCR5-4745 | − | ACAACUCUUAAUUGUGGCAACU | 22 | 4201 |
| CCR5-4746 | − | GACAACUCUUAAUUGUGGCAACU | 23 | 4202 |
| CCR5-4747 | − | UGACAACUCUUAAUUGUGGCAACU | 24 | 4203 |
| CCR5-4748 | − | GUCUAAAGAGUUUUAACU | 18 | 4204 |
| CCR5-4749 | − | UGUCUAAAGAGUUUUAACU | 19 | 4205 |
| CCR5-4750 | − | UUGUCUAAAGAGUUUUAACU | 20 | 4206 |
| CCR5-4751 | − | GUUGUCUAAAGAGUUUUAACU | 21 | 4207 |
| CCR5-4752 | − | UGUUGUCUAAAGAGUUUUAACU | 22 | 4208 |
| CCR5-4753 | − | CUGUUGUCUAAAGAGUUUUAACU | 23 | 4209 |
| CCR5-4754 | − | CCUGUUGUCUAAAGAGUUUUAACU | 24 | 4210 |
| CCR5-4755 | − | CGAGCCACAAGAUGCCCU | 18 | 4211 |
| CCR5-4756 | − | CCGAGCCACAAGAUGCCCU | 19 | 4212 |
| CCR5-4757 | − | CCCGAGCCACAAGAUGCCCU | 20 | 4213 |
| CCR5-4758 | − | UCCCGAGCCACAAGAUGCCCU | 21 | 4214 |
| CCR5-4759 | − | CUCCCGAGCCACAAGAUGCCCU | 22 | 4215 |
| CCR5-4760 | − | ACUCCCGAGCCACAAGAUGCCCU | 23 | 4216 |
| CCR5-4761 | − | UACUCCCGAGCCACAAGAUGCCCU | 24 | 4217 |
| CCR5-4762 | − | UAUAAUCUAUCUGAAGCU | 18 | 4218 |
| CCR5-4763 | − | AUAUAAUCUAUCUGAAGCU | 19 | 4219 |
| CCR5-4764 | − | GAUAUAAUCUAUCUGAAGCU | 20 | 4220 |
| CCR5-4765 | − | AGAUAUAAUCUAUCUGAAGCU | 21 | 4221 |
| CCR5-4766 | − | CAGAUAUAAUCUAUCUGAAGCU | 22 | 4222 |
| CCR5-4767 | − | CCAGAUAUAAUCUAUCUGAAGCU | 23 | 4223 |
| CCR5-4768 | − | UCCAGAUAUAAUCUAUCUGAAGCU | 24 | 4224 |
| CCR5-4769 | − | AGUAUUGUCAGCAGAGCU | 18 | 4225 |
| CCR5-4770 | − | AAGUAUUGUCAGCAGAGCU | 19 | 4226 |
| CCR5-4771 | − | CAAGUAUUGUCAGCAGAGCU | 20 | 4227 |
| CCR5-4772 | − | UCAAGUAUUGUCAGCAGAGCU | 21 | 4228 |
| CCR5-4773 | − | CUCAAGUAUUGUCAGCAGAGCU | 22 | 4229 |
| CCR5-4774 | − | UCUCAAGUAUUGUCAGCAGAGCU | 23 | 4230 |
| CCR5-4775 | − | AUCUCAAGUAUUGUCAGCAGAGCU | 24 | 4231 |
| CCR5-4776 | − | CUUUGGCUUGUGAUCUCU | 18 | 4232 |
| CCR5-4777 | − | GCUUUGGCUUGUGAUCUCU | 19 | 4233 |
| CCR5-4778 | − | AGCUUUGGCUUGUGAUCUCU | 20 | 4234 |
| CCR5-4779 | − | AAGCUUUGGCUUGUGAUCUCU | 21 | 4235 |
| CCR5-4780 | − | AAAGCUUUGGCUUGUGAUCUCU | 22 | 4236 |
| CCR5-4781 | − | AAAAGCUUUGGCUUGUGAUCUCU | 23 | 4237 |
| CCR5-4782 | − | AAAAAGCUUUGGCUUGUGAUCUCU | 24 | 4238 |
| CCR5-4783 | − | UUAAAAAUGAGCUUUUCU | 18 | 4239 |
| CCR5-4784 | − | AUUAAAAAUGAGCUUUUCU | 19 | 4240 |
| CCR5-3134 | − | AAUUAAAAAUGAGCUUUUCU | 20 | 4241 |
| CCR5-4785 | − | AAAUUAAAAAUGAGCUUUUCU | 21 | 4242 |
| CCR5-4786 | − | AAAAUUAAAAAUGAGCUUUUCU | 22 | 4243 |
| CCR5-4787 | − | CAAAAUUAAAAAUGAGCUUUUCU | 23 | 4244 |
| CCR5-4788 | − | UCAAAAUUAAAAAUGAGCUUUUCU | 24 | 4245 |
| CCR5-4789 | − | GUCUAAGGUGCAGGGAGU | 18 | 4246 |
| CCR5-4790 | − | AGUCUAAGGUGCAGGGAGU | 19 | 4247 |
| CCR5-4791 | − | UAGUCUAAGGUGCAGGGAGU | 20 | 4248 |
| CCR5-4792 | − | CUAGUCUAAGGUGCAGGGAGU | 21 | 4249 |
| CCR5-4793 | − | CCUAGUCUAAGGUGCAGGGAGU | 22 | 4250 |
| CCR5-4794 | − | GCCUAGUCUAAGGUGCAGGGAGU | 23 | 4251 |
| CCR5-4795 | − | UGCCUAGUCUAAGGUGCAGGGAGU | 24 | 4252 |
| CCR5-4796 | − | UCAAACCAGUAAGCAUUU | 18 | 4253 |
| CCR5-4797 | − | UUCAAACCAGUAAGCAUUU | 19 | 4254 |
| CCR5-4798 | − | CUUCAAACCAGUAAGCAUUU | 20 | 4255 |
| CCR5-4799 | − | CCUUCAAACCAGUAAGCAUUU | 21 | 4256 |
| CCR5-4800 | − | CCCUUCAAACCAGUAAGCAUUU | 22 | 4257 |
| CCR5-4801 | − | GCCCUUCAAACCAGUAAGCAUUU | 23 | 4258 |
| CCR5-4802 | − | UGCCCUUCAAACCAGUAAGCAUUU | 24 | 4259 |
| CCR5-4803 | − | CAGGUUUCCCAUCUUUUU | 18 | 4260 |
| CCR5-4804 | − | ACAGGUUUCCCAUCUUUUU | 19 | 4261 |
| CCR5-4805 | − | AACAGGUUUCCCAUCUUUUU | 20 | 4262 |
| CCR5-4806 | − | AAACAGGUUUCCCAUCUUUUU | 21 | 4263 |
| CCR5-4807 | − | UAAACAGGUUUCCCAUCUUUUU | 22 | 4264 |
| CCR5-4808 | − | CUAAACAGGUUUCCCAUCUUUUU | 23 | 4265 |
| CCR5-4809 | − | GCUAAACAGGUUUCCCAUCUUUUU | 24 | 4266 |

[0670] Table 7A provides exemplary targeting domains for knocking down the CCR5 gene selected according to the first tier parameters. The targeting domains bind within 500 bp (e.g., upstream or downstream) of a transcription start site (TSS) and have a high level of orthogonality. It is contemplated herein that in an embodiment the targeting domain hybridizes to the target domain through complementary base pairing. Any of the targeting domains in the table can be used with a N. meningitidis eiCas9 molecule or eiCas9 fusion protein (e.g., an eiCas9 fused to a transcription repressor domain) to alter the CCR5 gene (e.g., reduce or eliminate CCR5 gene expression, CCR5 protein function, or the level of CCR5 protein). One or more gRNAs may be used to target an eiCas9 to the promoter region of the CCR5 gene.

TABLE 7A
1st Tier

| | | | Target | |
|---|---|---|---|---|
| gRNA | DNA | | Site | SEQ ID |
| Name | Strand | Targeting Domain | Length | NO |
| CCR5-4810 | − | AUCCUUACCUCUCAAAA | 17 | 4267 |
| CCR5-4811 | + | CUAAAAGGUUAAGAAAA | 17 | 4268 |
| CCR5-4812 | − | AGCUGCUUGGCCUGUUA | 17 | 4269 |
| CCR5-4813 | + | AUUACUAUCCAAGAAGC | 17 | 4270 |
| CCR5-4814 | − | GUGAUCUUGUACAAAUC | 17 | 4271 |
| CCR5-4815 | − | CCGGUAAGUAACCUCUC | 17 | 4272 |
| CCR5-4816 | + | AUUUACGGGCUUUUCUC | 17 | 4273 |
| CCR5-4817 | − | AGACCAGAGAUCUAUUC | 17 | 4274 |
| CCR5-4818 | + | GUUCUCCUUAGCAGAAG | 17 | 4275 |
| CCR5-4819 | + | AUCUUUCUUUUGAGAGG | 17 | 4276 |
| CCR5-4820 | − | UUUUAUACUGUCUAUAU | 17 | 4277 |
| CCR5-4821 | − | UUCGCCUUCAAUACACU | 17 | 4278 |
| CCR5-4822 | + | UGACCCUUUCCUUAUCU | 17 | 4279 |
| CCR5-4823 | − | CUACUUUUAUACUGUCU | 17 | 4280 |
| CCR5-4824 | − | UAAAAAGAAGAACUGUU | 17 | 4281 |
| CCR5-4825 | + | GGUCUGAAGGUUUAUUU | 17 | 4282 |
| CCR5-4826 | − | ACAAUCCUUACCUCUCAAAA | 20 | 4283 |
| CCR5-4827 | + | AGGCUAAAAGGUUAAGAAAA | 20 | 4284 |
| CCR5-4828 | − | UACAUUUAAAGUUGGUUUAA | 20 | 4285 |
| CCR5-4829 | − | CUCAGCUGCUUGGCCUGUUA | 20 | 4286 |
| CCR5-4830 | + | GAAAUUACUAUCCAAGAAGC | 20 | 4287 |
| CCR5-4831 | − | CCUGUGAUCUUGUACAAAUC | 20 | 4288 |
| CCR5-4832 | − | UCCCCGGUAAGUAACCUCUC | 20 | 4289 |
| CCR5-4833 | + | UUUAUUUACGGGCUUUUCUC | 20 | 4290 |
| CCR5-4834 | − | UUCAGACCAGAGAUCUAUUC | 20 | 4291 |
| CCR5-4835 | + | UUAGUUCUCCUUAGCAGAAG | 20 | 4292 |
| CCR5-3491 | + | GAACAGUUCUUCUUUUUAAG | 20 | 4293 |
| CCR5-4836 | + | CAAAUCUUUCUUUUGAGAGG | 20 | 4294 |
| CCR5-4837 | − | UACUUUUAUACUGUCUAUAU | 20 | 4295 |
| CCR5-4838 | − | CUUUUCGCCUUCAAUACACU | 20 | 4296 |
| CCR5-4839 | + | CUGUGACCCUUUCCUUAUCU | 20 | 4297 |
| CCR5-4840 | − | UUCCUACUUUUAUACUGUCU | 20 | 4298 |
| CCR5-4841 | + | CCUUAGCAGAAGAUAAGAUU | 20 | 4299 |
| CCR5-4842 | − | ACUUAAAAAGAAGAACUGUU | 20 | 4300 |
| CCR5-3668 | + | UCUGGUCUGAAGGUUUAUUU | 20 | 4301 |

[0671] Table 7B provides exemplary targeting domains for knocking down the CCR5 gene selected according to the second tier parameters. The targeting domains bind within 500 bp (e.g., upstream or downstream) of a transcription start site (TSS). It is contemplated herein that in an embodiment the targeting domain hybridizes to the target domain through complementary base pairing. Any of the targeting domains in the table can be used with a N. meningitidis eiCas9 molecule or eiCas9 fusion protein (e.g., an eiCas9 fused to a transcription repressor domain) to alter the CCR5 gene (e.g., reduce or eliminate CCR5 gene expression, CCR5 protein function, or the level of CCR5 protein). One or more gRNAs may be used to target an eiCas9 to the promoter region of the CCR5 gene.

TABLE 7B
2nd Tier

| | | | Target | |
|---|---|---|---|---|
| gRNA | DNA | | Site | SEQ ID |
| Name | Strand | Targeting Domain | Length | NO |
| CCR5-4843 | − | AACAUCAAAGAUACAAA | 17 | 4302 |
| CCR5-4844 | − | AUUUAAAGUUGGUUUAA | 17 | 4303 |
| CCR5-4845 | + | UGAUUUGUACAAGAUCA | 17 | 4304 |
| CCR5-4846 | + | CAGUUCUUCUUUUUAAG | 17 | 4305 |
| CCR5-4847 | − | AUUUCUUUUACUAAAAU | 17 | 4306 |
| CCR5-4848 | − | UAUUCUUUAUAUUUUCU | 17 | 4307 |
| CCR5-4849 | + | UAGCAGAAGAUAAGAUU | 17 | 4308 |
| CCR5-4850 | − | UAUAACAUCAAAGAUACAAA | 20 | 4309 |
| CCR5-3386 | + | AAAUGAUUUGUACAAGAUCA | 20 | 4310 |
| CCR5-3978 | − | GUAAUUUCUUUUACUAAAAU | 20 | 4311 |
| CCR5-4851 | − | CUUUAUUCUUUAUAUUUUCU | 20 | 4312 |

[0672] Table 7C provides exemplary targeting domains for knocking down the CCR5 gene selected according to the third tier parameters. Within the additional 500 bp (e.g., upstream or downstream) of a transcription start site (TSS), e.g., extending to 1 kb upstream and downstream of a TSS. It is contemplated herein that in an embodiment the targeting domain hybridizes to the target domain through complementary base pairing. Any of the targeting domains in the table can be used with a N. meningitidis eiCas9 molecule or eiCas9 fusion protein (e.g., an eiCas9 fused to a transcription repressor domain) to alter the CCR5 gene (e.g., reduce or eliminate CCR5 gene expression, CCR5 protein function, or the level of CCR5 protein). One or more gRNAs may be used to target an eiCas9 to the promoter region of the CCR5 gene.

TABLE 7C
3rd Tier

| | | | Target | |
|---|---|---|---|---|
| gRNA | DNA | | Site | SEQ ID |
| Name | Strand | Targeting Domain | Length | NO |
| CCR5-4852 | − | AUGGUUCAAAAUUAAAA | 17 | 4313 |
| CCR5-4853 | + | AUGUCACCAACCGCCAA | 17 | 4314 |
| CCR5-4854 | + | AAUUUCUCAUAGCUUCA | 17 | 4315 |
| CCR5-4855 | − | ACCUUGGCUCUAGAAUA | 17 | 4316 |
| CCR5-4856 | + | AGCUCUGCUGACAAUAC | 17 | 4317 |
| CCR5-4857 | − | GCUCUAGAAUAAAAAGC | 17 | 4318 |
| CCR5-4858 | + | UCUUAGAGAUCACAAGC | 17 | 4319 |
| CCR5-3022 | − | UGGACCCAGGAUCUUAG | 17 | 4320 |
| CCR5-4859 | − | AAACUUCACAGAAAAUG | 17 | 4321 |
| CCR5-4860 | − | UGCCAGAUACAUAGGUG | 17 | 4322 |
| CCR5-4861 | + | AUAGUGUGAGUCCUCAU | 17 | 4323 |
| CCR5-4862 | − | GAGCCACAAGAUGCCCU | 17 | 4324 |
| CCR5-4863 | + | UCAUGUGGAAAAUUUCU | 17 | 4325 |
| CCR5-3052 | − | UAAAAAUGAGCUUUUCU | 17 | 4326 |
| CCR5-4864 | + | AUUAAUUUUGACCAUUU | 17 | 4327 |
| CCR5-4531 | − | UUUAUGGUUCAAAAUUAAAA | 20 | 4328 |
| CCR5-4231 | + | CAGAUGUCACCAACCGCCAA | 20 | 4329 |
| CCR5-4865 | + | GAAAAUUUCUCAUAGCUUCA | 20 | 4330 |
| CCR5-4866 | − | GUGACCUUGGCUCUAGAAUA | 20 | 4331 |
| CCR5-4306 | + | CUCAGCUCUGCUGACAAUAC | 20 | 4332 |
| CCR5-4867 | − | UUGGCUCUAGAAUAAAAAGC | 20 | 4333 |
| CCR5-4868 | + | CCUUCUUAGAGAUCACAAGC | 20 | 4334 |
| CCR5-3106 | − | UUCUGGACCCAGGAUCUUAG | 20 | 4335 |
| CCR5-4869 | − | CACAAACUUCACAGAAAAUG | 20 | 4336 |
| CCR5-4870 | − | CUAUGCCAGAUACAUAGGUG | 20 | 4337 |
| CCR5-4871 | + | GGCAUAGUGUGAGUCCUCAU | 20 | 4338 |
| CCR5-4757 | − | CCCGAGCCACAAGAUGCCCU | 20 | 4339 |
| CCR5-4872 | + | AUGUCAUGUGGAAAAUUUCU | 20 | 4340 |
| CCR5-3134 | − | AAUUAAAAAUGAGCUUUUCU | 20 | 4341 |
| CCR5-4873 | + | AAUAUUAAUUUUGACCAUUU | 20 | 4342 |

### III. Cas9 Molecules

[0673] Cas9 molecules of a variety of species can be used in the methods and compositions described herein. While the S. pyogenes, S. aureus, and S. thermophilus Cas9 molecules are the subject of much of the disclosure herein, Cas9 molecules of, derived from, or based on the Cas9 proteins of other species listed herein can be used as well. In other words, while the much of the description herein uses S. pyogenes and S. thermophilus Cas9 molecules, Cas9 molecules from the other species can replace them, e.g., Staphylococcus aureus and Neisseria meningitides Cas9 molecules. Additional Cas9 species include: Acidovorax avenae, Actinobacillus pleuropneumonias, Actinobacillus succinogenes, Actinobacillus suis, Actinomyces sp., cycliphilus denitrificans, Aminomonas paucivorans, Bacillus cereus, Bacillus smithii, Bacillus thuringiensis, Bacteroides sp., Blastopirellula marina, Bradyrhizobium sp., Brevibacillus laterosporus, Campylobacter coli, Campylobacter jejuni, Campylobacter lari, Candidatus Puniceispirillum, Clostridium cellulolyticum, Clostridium perfringens, Corynebacterium accolens, Corynebacterium diphtheria, Corynebacterium matruchotii, Dinoroseobacter shibae, Eubacterium dolichum, gamma proteobacterium, Gluconacetobacter diazotrophicus, Haemophilus parainfluenzae, Haemophilus sputorum, Helicobacter canadensis, Helicobacter cinaedi, Helicobacter mustelae, Ilyobacter polytropus, Kingella kingae, Lactobacillus crispatus, Listeria ivanovii, Listeria monocytogenes, Listeriaceae bacterium, Methylocystis sp., Methylosinus trichosporium, Mobiluncus mulieris, Neisseria bacilliformis, Neisseria cinerea, Neisseria flavescens, Neisseria lactamica, Neisseria sp., Neisseria wadsworthii, Nitrosomonas sp., Parvibaculum lavamentivorans, Pasteurella multocida, Phascolarctobacterium succinatutens, Ralstonia syzygii, Rhodopseudomonas palustris, Rhodovulum sp., Simonsiella muelleri, Sphingomonas sp., Sporolactobacillus vineae, Staphylococcus lugdunensis, Streptococcus sp., Subdoligranulum sp., Tistrella mobilis, Treponema sp., or Verminephrobacter eiseniae.

[0674] A Cas9 molecule, or Cas9 polypeptide, as that term is used herein, refers to a molecule or polypeptide that can interact with a guide RNA (gRNA) molecule and, in concert with the gRNA molecule, home or localizes to a site which comprises a target domain and PAM sequence. Cas9 molecule and Cas9 polypeptide, as those terms are used herein, refer to naturally occurring Cas9 molecules and to engineered, altered, or modified Cas9 molecules or Cas9 polypeptides that differ, e.g., by at least one amino acid residue, from a reference sequence, e.g., the most similar naturally occurring Cas9 molecule or a sequence of Table 8.

[0675] Cas9 Domains

[0676] Crystal structures have been determined for two different naturally occurring bacterial Cas9 molecules (Jinek et al., Science, 343(6176):1247997, 2014) and for S. pyogenes Cas9 with a guide RNA (e.g., a synthetic fusion of crRNA and tracrRNA) (Nishimasu et al., Cell, 156:935-949, 2014; and Anders et al., Nature, 2014, doi: 10.1038/nature13579).

[0677] A naturally occurring Cas9 molecule comprises two lobes: a recognition (REC) lobe and a nuclease (NUC) lobe; each of which further comprises domains described herein. FIGS. 9A-9B provide a schematic of the organization of important Cas9 domains in the primary structure. The domain nomenclature and the numbering of the amino acid residues encompassed by each domain used throughout this disclosure is as described in Nishimasu et al. The numbering of the amino acid residues is with reference to Cas9 from S. pyogenes.

[0678] The REC lobe comprises the arginine-rich bridge helix (BH), the REC1 domain, and the REC2 domain. The REC lobe does not share structural similarity with other known proteins, indicating that it is a Cas9-specific functional domain. The BH domain is a long a helix and arginine rich region and comprises amino acids 60-93 of the sequence of S. pyogenes Cas9. The REC1 domain is important for recognition of the repeat:anti-repeat duplex, e.g., of a gRNA or a tracrRNA, and is therefore critical for Cas9 activity by recognizing the target sequence. The REC1 domain comprises two REC1 motifs at amino acids 94 to 179 and 308 to 717 of the sequence of S. pyogenes Cas9. These two REC1 domains, though separated by the REC2 domain in the linear primary structure, assemble in the tertiary structure to form the REC1 domain. The REC2 domain, or parts thereof, may also play a role in the recognition of the repeat:anti-repeat duplex. The REC2 domain comprises amino acids 180-307 of the sequence of S. pyogenes Cas9.

[0679] The NUC lobe comprises the RuvC domain (also referred to herein as RuvC-like domain), the HNH domain (also referred to herein as HNH-like domain), and the PAM-interacting (PI) domain. The RuvC domain shares structural similarity to retroviral integrase superfamily members and cleaves a single strand, e.g., the non-complementary strand of the target nucleic acid molecule. The RuvC domain is assembled from the three split RuvC motifs (RuvCI, RuvCII, and RuvCIII, which are often commonly referred to in the art as RuvCI domain, or N-terminal RuvC domain, RuvCII domain, and RuvCIII domain) at amino acids 1-59, 718-769, and 909-1098, respectively, of the sequence of S. pyogenes Cas9. Similar to the REC1 domain, the three RuvC motifs are linearly separated by other domains in the primary structure, however in the tertiary structure, the three RuvC motifs assemble and form the RuvC domain. The HNH domain shares structural similarity with HNH endonucleases, and cleaves a single strand, e.g., the complementary strand of the target nucleic acid molecule. The HNH domain lies between the RuvC II-III motifs and comprises amino acids 775-908 of the sequence of S. pyogenes Cas9. The PI domain interacts with the PAM of the target nucleic acid molecule, and comprises amino acids 1099-1368 of the sequence of S. pyogenes Cas9.

[0680] A RuvC-Like Domain and an HNH-Like Domain

[0681] In an embodiment, a Cas9 molecule or Cas9 polypeptide comprises an HNH-like domain and a RuvC-like domain. In an embodiment, cleavage activity is dependent on a RuvC-like domain and an HNH-like domain. A Cas9 molecule or Cas9 polypeptide, e.g., an eaCas9 molecule or eaCas9 polypeptide, can comprise one or more of the following domains: a RuvC-like domain and an HNH-like domain. In an embodiment, a Cas9 molecule or Cas9 polypeptide is an eaCas9 molecule or eaCas9 polypeptide and the eaCas9 molecule or eaCas9 polypeptide comprises a RuvC-like domain, e.g., a RuvC-like domain described below, and/or an HNH-like domain, e.g., an HNH-like domain described below.

[0682] RuvC-Like Domains

[0683] In an embodiment, a RuvC-like domain cleaves, a single strand, e.g., the non-complementary strand of the target nucleic acid molecule. The Cas9 molecule or Cas9 polypeptide can include more than one RuvC-like domain (e.g., one, two, three or more RuvC-like domains). In an embodiment, a RuvC-like domain is at least 5, 6, 7, 8 amino acids in length but not more than 20, 19, 18, 17, 16 or 15 amino acids in length. In an embodiment, the Cas9 molecule or Cas9 polypeptide comprises an N-terminal RuvC-like domain of about 10 to 20 amino acids, e.g., about 15 amino acids in length.

[0684] N-Terminal RuvC-Like Domains

[0685] Some naturally occurring Cas9 molecules comprise more than one RuvC-like domain with cleavage being dependent on the N-terminal RuvC-like domain. Accordingly, Cas9 molecules or Cas9 polypeptide can comprise an N-terminal RuvC-like domain. Exemplary N-terminal RuvC-like domains are described below.

[0686] In an embodiment, an eaCas9 molecule or eaCas9 polypeptide comprises an N-terminal RuvC-like domain comprising an amino acid sequence of formula I:

(SEQ ID NO: 8)

D-X1-G-X2-X3-X4-X5-G-X6-X7-X8-X9,

[0687] wherein,

[0688] X1 is selected from I, V, M, L and T (e.g., selected from I, V, and L);

[0689] X2 is selected from T, I, V, S, N, Y, E and L (e.g., selected from T, V, and I);

[0690] X3 is selected from N, S, G, A, D, T, R, M and F (e.g., A or N);

[0691] X4 is selected from S, Y, N and F (e.g., S);

[0692] X5 is selected from V, I, L, C, T and F (e.g., selected from V, I and L);

[0693] X6 is selected from W, F, V, Y, S and L (e.g., W);

[0694] X7 is selected from A, S, C, V and G (e.g., selected from A and S);

[0695] X8 is selected from V, I, L, A, M and H (e.g., selected from V, I, M and L); and

[0696] X9 is selected from any amino acid or is absent (e.g., selected from T, V, I, L, Δ, F, S, A, Y, M and R, or, e.g., selected from T, V, I, L and Δ).

[0697] In an embodiment, the N-terminal RuvC-like domain differs from a sequence of SEQ ID NO:8, by as many as 1 but no more than 2, 3, 4, or 5 residues.

[0698] In embodiment, the N-terminal RuvC-like domain is cleavage competent.

[0699] In embodiment, the N-terminal RuvC-like domain is cleavage incompetent.

[0700] In an embodiment, a eaCas9 molecule or eaCas9 polypeptide comprises an N-terminal RuvC-like domain comprising an amino acid sequence of formula II:

(SEQ ID NO: 9)

D-X1-G-X2-X3-S-X5-G-X6-X7-X8-X9,,

[0701] wherein

[0702] X1 is selected from I, V, M, L and T (e.g., selected from I, V, and L);

[0703] X2 is selected from T, I, V, S, N, Y, E and L (e.g., selected from T, V, and I);

[0704] X3 is selected from N, S, G, A, D, T, R, M and F (e.g., A or N);

[0705] X5 is selected from V, I, L, C, T and F (e.g., selected from V, I and L);

[0706] X6 is selected from W, F, V, Y, S and L (e.g., W);

[0707] X7 is selected from A, S, C, V and G (e.g., selected from A and S);

[0708] X8 is selected from V, I, L, A, M and H (e.g., selected from V, I, M and L); and

[0709] X9 is selected from any amino acid or is absent (e.g., selected from T, V, I, L, Δ, F, S, A, Y, M and R or selected from e.g., T, V, I, L and Δ).

[0710] In an embodiment, the N-terminal RuvC-like domain differs from a sequence of SEQ ID NO:9 by as many as 1 but no more than 2, 3, 4, or 5 residues.

[0711] In an embodiment, the N-terminal RuvC-like domain comprises an amino acid sequence of formula III:

(SEQ ID NO: 10)

D-I-G-X2-X3-S-V-G-W-A-X8-X9,

[0712] wherein

[0713] X2 is selected from T, I, V, S, N, Y, E and L (e.g., selected from T, V, and I);

[0714] X3 is selected from N, S, G, A, D, T, R, M and F (e.g., A or N);

[0715] X8 is selected from V, I, L, A, M and H (e.g., selected from V, I, M and L); and

[0716] X9 is selected from any amino acid or is absent (e.g., selected from T, V, I, L, Δ, F, S, A, Y, M and R or selected from e.g., T, V, I, L and Δ).

[0717] In an embodiment, the N-terminal RuvC-like domain differs from a sequence of SEQ ID NO:10 by as many as 1 but no more than, 2, 3, 4, or 5 residues.

[0718] In an embodiment, the N-terminal RuvC-like domain comprises an amino acid sequence of formula III:

(SEQ ID NO: 11)

D-I-G-T-N-S-V-G-W-A-V-X,

[0719] wherein

[0720] X is a non-polar alkyl amino acid or a hydroxyl amino acid, e.g., X is selected from V, I, L and T (e.g., the eaCas9 molecule can comprise an N-terminal RuvC-like domain shown in FIGS. 2A-2G (is depicted as Y)).

[0721] In an embodiment, the N-terminal RuvC-like domain differs from a sequence of SEQ ID NO:11 by as many as 1 but no more than, 2, 3, 4, or 5 residues.

[0722] In an embodiment, the N-terminal RuvC-like domain differs from a sequence of an N-terminal RuvC like domain disclosed herein, e.g., in FIGS. 3A-3B or FIGS. 7A-7B, as many as 1 but no more than 2, 3, 4, or 5 residues. In an embodiment, 1, 2, 3 or all of the highly conserved residues identified in FIGS. 3A-3B or FIGS. 7A-7B are present.

[0723] In an embodiment, the N-terminal RuvC-like domain differs from a sequence of an N-terminal RuvC-like domain disclosed herein, e.g., in FIGS. 4A-4B or FIGS. 7A-7B, as many as 1 but no more than 2, 3, 4, or 5 residues. In an embodiment, 1, 2, or all of the highly conserved residues identified in FIGS. 4A-4B or FIGS. 7A-7B are present.

[0724] Additional RuvC-Like Domains

[0725] In addition to the N-terminal RuvC-like domain, the Cas9 molecule or Cas9 polypeptide, e.g., an eaCas9 molecule or eaCas9 polypeptide, can comprise one or more additional RuvC-like domains. In an embodiment, the Cas9 molecule or Cas9 polypeptide can comprise two additional RuvC-like domains. Preferably, the additional RuvC-like domain is at least 5 amino acids in length and, e.g., less than 15 amino acids in length, e.g., 5 to 10 amino acids in length, e.g., 8 amino acids in length.

[0726] An additional RuvC-like domain can comprise an amino acid sequence:

[0727] I-X1-X2-E-X3-A-R-E (SEQ ID NO:12), wherein

[0728] X1 is V or H,

[0729] X2 is I, L or V (e.g., I or V); and

[0730] X3 is M or T.

[0731] In an embodiment, the additional RuvC-like domain comprises the amino acid sequence:

[0732] I—V-X2-E-M-A-R-E (SEQ ID NO:13), wherein

[0733] X2 is I, L or V (e.g., I or V) (e.g., the eaCas9 molecule or eaCas9 polypeptide can comprise an additional RuvC-like domain shown in FIG. 2A-2G or FIGS. 7A-7B (depicted as B)).

[0734] An additional RuvC-like domain can comprise an amino acid sequence:

[0735] H-H-A-X1-D-A-X2-X3 (SEQ ID NO: 14), wherein

[0736] X1 is H or L;

[0737] X2 is R or V; and

[0738] X3 is E or V.

[0739] In an embodiment, the additional RuvC-like domain comprises the amino acid sequence:

(SEQ ID NO: 15)

H-H-A-H-D-A-Y-L.

[0740] In an embodiment, the additional RuvC-like domain differs from a sequence of SEQ ID NO: 12, 13, 14 or 15 by as many as 1 but no more than 2, 3, 4, or 5 residues.

[0741] In some embodiments, the sequence flanking the N-terminal RuvC-like domain is a sequence of formula V:

(SEQ ID NO: 16)

K-X1′-Y-X2′-X3′-X4′-Z-T-D-X9′-Y,.

wherein

[0742] X1′ is selected from K and P,

[0743] X2′ is selected from V, L, I, and F (e.g., V, I and L);

[0744] X3′ is selected from G, A and S (e.g., G),

[0745] X4′ is selected from L, I, V and F (e.g., L);

[0746] X9′ is selected from D, E, N and Q; and

[0747] Z is an N-terminal RuvC-like domain, e.g., as described above.

[0748] HNH-Like Domains

[0749] In an embodiment, an HNH-like domain cleaves a single stranded complementary domain, e.g., a complementary strand of a double stranded nucleic acid molecule. In an embodiment, an HNH-like domain is at least 15, 20, 25 amino acids in length but not more than 40, 35 or 30 amino acids in length, e.g., 20 to 35 amino acids in length, e.g., 25 to 30 amino acids in length. Exemplary HNH-like domains are described below.

[0750] In an embodiment, an eaCas9 molecule or eaCas9 polypeptide comprises an HNH-like domain having an amino acid sequence of formula VI:

[0751] X1-X2-X3-H-X4-X5-P-X6-X7-X8-X9-X10-X11-X12-X13-X14-X15-N-X16-X17-X18-X19-X20-X21-X22-X23-N(SEQ ID NO: 17), wherein

[0752] X1 is selected from D, E, Q and N (e.g., D and E);

[0753] X2 is selected from L, I, R, Q, V, M and K;

[0754] X3 is selected from D and E;

[0755] X4 is selected from I, V, T, A and L (e.g., A, I and V);

[0756] X5 is selected from V, Y, I, L, F and W (e.g., V, I and L);

[0757] X6 is selected from Q, H, R, K, Y, I, L, F and W;

[0758] X7 is selected from S, A, D, T and K (e.g., S and A);

[0759] X8 is selected from F, L, V, K, Y, M, I, R, A, E, D and Q (e.g., F);

[0760] X9 is selected from L, R, T, I, V, S, C, Y, K, F and G;

[0761] X10 is selected from K, Q, Y, T, F, L, W, M, A, E, G, and S;

[0762] X11 is selected from D, S, N, R, L and T (e.g., D);

[0763] X12 is selected from D, N and S;

[0764] X13 is selected from S, A, T, G and R (e.g., S);

[0765] X14 is selected from I, L, F, S, R, Y, Q, W, D, K and H (e.g., I, L and F);

[0766] X15 is selected from D, S, I, N, E, A, H, F, L, Q, M, G, Y and V;

[0767] X16 is selected from K, L, R, M, T and F (e.g., L, R and K);

[0768] X17 is selected from V, L, I, A and T;

[0769] X18 is selected from L, I, V and A (e.g., L and I);

[0770] X19 is selected from T, V, C, E, S and A (e.g., T and V);

[0771] X20 is selected from R, F, T, W, E, L, N, C, K, V, S, Q, I, Y, H and A;

[0772] X21 is selected from S, P, R, K, N, A, H, Q, G and L;

[0773] X22 is selected from D, G, T, N, S, K, A, I, E, L, Q, R and Y; and

[0774] X23 is selected from K, V, A, E, Y, I, C, L, S, T, G, K, M, D and F.

[0775] In an embodiment, a HNH-like domain differs from a sequence of SEQ ID NO: 17 by at least one but no more than, 2, 3, 4, or 5 residues.

[0776] In an embodiment, the HNH-like domain is cleavage competent.

[0777] In an embodiment, the HNH-like domain is cleavage incompetent.

[0778] In an embodiment, an eaCas9 molecule or eaCas9 polypeptide comprises an HNH-like domain comprising an amino acid sequence of formula VII:

(SEQ ID NO: 18)

X1-X2-X3-H-X4-X5-P-X6-S-X8-X9-X10-D-D-S-X14-X15-N-
K-V-L-X19-X20-X21-X22-X23-N,

[0779] wherein

[0780] X1 is selected from D and E;

[0781] X2 is selected from L, I, R, Q, V, M and K;

[0782] X3 is selected from D and E;

[0783] X4 is selected from I, V, T, A and L (e.g., A, I and V);

[0784] X5 is selected from V, Y, I, L, F and W (e.g., V, I and L);

[0785] X6 is selected from Q, H, R, K, Y, I, L, F and W;

[0786] X8 is selected from F, L, V, K, Y, M, I, R, A, E, D and Q (e.g., F);

[0787] X9 is selected from L, R, T, I, V, S, C, Y, K, F and G;

[0788] X10 is selected from K, Q, Y, T, F, L, W, M, A, E, G, and S;

[0789] X14 is selected from I, L, F, S, R, Y, Q, W, D, K and H (e.g., I, L and F);

[0790] X15 is selected from D, S, I, N, E, A, H, F, L, Q, M, G, Y and V;

[0791] X19 is selected from T, V, C, E, S and A (e.g., T and V);

[0792] X20 is selected from R, F, T, W, E, L, N, C, K, V, S, Q, I, Y, H and A;

[0793] X21 is selected from S, P, R, K, N, A, H, Q, G and L;

[0794] X22 is selected from D, G, T, N, S, K, A, I, E, L, Q, R and Y; and

[0795] X23 is selected from K, V, A, E, Y, I, C, L, S, T, G, K, M, D and F.

[0796] In an embodiment, the HNH-like domain differs from a sequence of SEQ ID NO: 18 by 1, 2, 3, 4, or 5 residues.

[0797] In an embodiment, an eaCas9 molecule or eaCas9 polypeptide comprises an HNH-like domain comprising an amino acid sequence of formula VII:

(SEQ ID NO: 19)

X1-V-X3-H-I-V-P-X6-S-X8-X9-X10-D-D-S-X14-X15-N-K-
V-L-T-X20-X21-X22-X23-N,

[0798] wherein

[0799] X1 is selected from D and E;

[0800] X3 is selected from D and E;

[0801] X6 is selected from Q, H, R, K, Y, I, L and W;

[0802] X8 is selected from F, L, V, K, Y, M, I, R, A, E, D and Q (e.g., F);

[0803] X9 is selected from L, R, T, I, V, S, C, Y, K, F and G;

[0804] X10 is selected from K, Q, Y, T, F, L, W, M, A, E, G, and S;

[0805] X14 is selected from I, L, F, S, R, Y, Q, W, D, K and H (e.g., I, L and F);

[0806] X15 is selected from D, S, I, N, E, A, H, F, L, Q, M, G, Y and V;

[0807] X20 is selected from R, F, T, W, E, L, N, C, K, V, S, Q, I, Y, H and A;

[0808] X21 is selected from S, P, R, K, N, A, H, Q, G and L;

[0809] X22 is selected from D, G, T, N, S, K, A, I, E, L, Q, R and Y; and

[0810] X23 is selected from K, V, A, E, Y, I, C, L, S, T, G, K, M, D and F.

[0811] In an embodiment, the HNH-like domain differs from a sequence of SEQ ID NO: 19 by 1, 2, 3, 4, or 5 residues.

[0812] In an embodiment, an eaCas9 molecule or eaCas9 polypeptide comprises an HNH-like domain having an amino acid sequence of formula VIII:

(SEQ ID NO: 20)

D-X2-D-H-I-X5-P-Q-X7-F-X9-X10-D-X12-S-I-D-N-X16-V-
L-X19-X20-S-X22-X23-N,

[0813] wherein

[0814] X2 is selected from I and V;

[0815] X5 is selected from I and V;

[0816] X7 is selected from A and S;

[0817] X9 is selected from I and L;

[0818] X10 is selected from K and T;

[0819] X12 is selected from D and N;

[0820] X16 is selected from R, K and L; X19 is selected from T and V;

[0821] X20 is selected from S and R;

[0822] X22 is selected from K, D and A; and

[0823] X23 is selected from E, K, G and N (e.g., the eaCas9 molecule or eaCas9 polypeptide can comprise an HNH-like domain as described herein).

[0824] In an embodiment, the HNH-like domain differs from a sequence of SEQ ID NO: 20 by as many as 1 but no more than 2, 3, 4, or 5 residues.

[0825] In an embodiment, an eaCas9 molecule or eaCas9 polypeptide comprises the amino acid sequence of formula IX:

(SEQ ID NO: 21)

L-Y-Y-L-Q-N-G-X1′-D-M-Y-X2′-X3′-X4′-X5′-L-D-I-X6′-
X7′-L-S-X8′-Y-Z-N-R-X9′-K-X10′-D-X11′-V-P,

[0826] wherein

[0827] X1′ is selected from K and R;

[0828] X2′ is selected from V and T;

[0829] X3′ is selected from G and D;

[0830] X4′ is selected from E, Q and D;

[0831] X5′ is selected from E and D;

[0832] X6′ is selected from D, N and H;

[0833] X7′ is selected from Y, R and N;

[0834] X8′ is selected from Q, D and N; X9′ is selected from G and E;

[0835] X10′ is selected from S and G;

[0836] X11′ is selected from D and N; and

[0837] Z is an HNH-like domain, e.g., as described above.

[0838] In an embodiment, the eaCas9 molecule or eaCas9 polypeptide comprises an amino acid sequence that differs from a sequence of SEQ ID NO:21 by as many as 1 but no more than 2, 3, 4, or 5 residues.

[0839] In an embodiment, the HNH-like domain differs from a sequence of an HNH-like domain disclosed herein, e.g., in FIGS. 5A-5C or FIGS. 7A-7B, as many as 1 but no more than 2, 3, 4, or 5 residues. In an embodiment, 1 or both of the highly conserved residues identified in FIGS. 5A-5C or FIGS. 7A-7B are present.

[0840] In an embodiment, the HNH-like domain differs from a sequence of an HNH-like domain disclosed herein, e.g., in FIGS. 6A-6B or FIGS. 7A-7B, as many as 1 but no more than 2, 3, 4, or 5 residues. In an embodiment, 1, 2, all 3 of the highly conserved residues identified in FIGS. 6A-6B or FIGS. 7A-7B are present.

[0841] Cas9 Activities

[0842] Nuclease and Helicase Activities

[0843] In an embodiment, the Cas9 molecule or Cas9 polypeptide is capable of cleaving a target nucleic acid molecule. Typically wild type Cas9 molecules cleave both strands of a target nucleic acid molecule. Cas9 molecules and Cas9 polypeptides can be engineered to alter nuclease cleavage (or other properties), e.g., to provide a Cas9 molecule or Cas9 polypeptide which is a nickase, or which lacks the ability to cleave target nucleic acid. A Cas9 molecule or Cas9 polypeptide that is capable of cleaving a target nucleic acid molecule is referred to herein as an eaCas9 (an enzymatically active Cas9) molecule or eaCas9 polypeptide. In an embodiment, an eaCas9 molecule or Cas9 polypeptide comprises one or more of the following activities:

[0844] a nickase activity, i.e., the ability to cleave a single strand, e.g., the non-complementary strand or the complementary strand, of a nucleic acid molecule;

[0845] a double stranded nuclease activity, i.e., the ability to cleave both strands of a double stranded nucleic acid and create a double stranded break, which in an embodiment is the presence of two nickase activities;

[0846] an endonuclease activity;

[0847] an exonuclease activity; and

[0848] a helicase activity, i.e., the ability to unwind the helical structure of a double stranded nucleic acid.

[0849] In an embodiment, an enzymatically active Cas9 or an eaCas9 molecule or an eaCas9 polypeptide cleaves both DNA strands and results in a double stranded break. In an embodiment, an eaCas9 molecule cleaves only one strand, e.g., the strand to which the gRNA hybridizes to, or the strand complementary to the strand the gRNA hybridizes with. In an embodiment, an eaCas9 molecule or eaCas9 polypeptide comprises cleavage activity associated with an HNH-like domain. In an embodiment, an eaCas9 molecule or eaCas9 polypeptide comprises cleavage activity associated with an N-terminal RuvC-like domain. In an embodiment, an eaCas9 molecule or eaCas9 polypeptide comprises cleavage activity associated with an HNH-like domain and cleavage activity associated with an N-terminal RuvC-like domain. In an embodiment, an eaCas9 molecule or eaCas9 polypeptide comprises an active, or cleavage competent, HNH-like domain and an inactive, or cleavage incompetent, N-terminal RuvC-like domain. In an embodiment, an eaCas9 molecule or eaCas9 polypeptide comprises an inactive, or cleavage incompetent, HNH-like domain and an active, or cleavage competent, N-terminal RuvC-like domain.

[0850] Some Cas9 molecules or Cas9 polypeptides have the ability to interact with a gRNA molecule, and in conjunction with the gRNA molecule localize to a core target domain, but are incapable of cleaving the target nucleic acid, or incapable of cleaving at efficient rates. Cas9 molecules having no, or no substantial, cleavage activity are referred to herein as an eiCas9 molecule or eiCas9 polypeptide. For example, an eiCas9 molecule or eiCas9 polypeptide can lack cleavage activity or have substantially less, e.g., less than 20, 10, 5, 1 or 0.1% of the cleavage activity of a reference Cas9 molecule or eiCas9 polypeptide, as measured by an assay described herein.

[0851] Targeting and PAMs

[0852] A Cas9 molecule or Cas9 polypeptide, is a polypeptide that can interact with a guide RNA (gRNA) molecule and, in concert with the gRNA molecule, localizes to a site which comprises a target domain and PAM sequence.

[0853] In an embodiment, the ability of an eaCas9 molecule or eaCas9 polypeptide to interact with and cleave a target nucleic acid is PAM sequence dependent. A PAM sequence is a sequence in the target nucleic acid. In an embodiment, cleavage of the target nucleic acid occurs upstream from the PAM sequence. EaCas9 molecules from different bacterial species can recognize different sequence motifs (e.g., PAM sequences). In an embodiment, an eaCas9 molecule of S. pyogenes recognizes the sequence motif NGG and directs cleavage of a target nucleic acid sequence 1 to 10, e.g., 3 to 5, base pairs upstream from that sequence. See, e.g., Mali et al., SCIENCE 2013; 339(6121): 823-826. In an embodiment, an eaCas9 molecule of S. thermophilus recognizes the sequence motif NGGNG and NNAGAAW (W=A or T) and directs cleavage of a core target nucleic acid sequence 1 to 10, e.g., 3 to 5, base pairs upstream from these sequences. See, e.g., Horvath et al., SCIENCE 2010; 327(5962):167-170, and Deveau et al., J BACTERIOL 2008; 190(4): 1390-1400. In an embodiment, an eaCas9 molecule of S. mutans recognizes the sequence motif NGG and/or NAAR (R=A or G) and directs cleavage of a core target nucleic acid sequence 1 to 10, e.g., 3 to 5 base pairs, upstream from this sequence. See, e.g., Deveau et al., J BACTERIOL 2008; 190(4): 1390-1400. In an embodiment, an eaCas9 molecule of S. aureus recognizes the sequence motif NNGRR (R=A or G) and directs cleavage of a target nucleic acid sequence 1 to 10, e.g., 3 to 5, base pairs upstream from that sequence. In an embodiment, an eaCas9 molecule of S. aureus recognizes the sequence motif NNGRRN (R=A or G) and directs cleavage of a target nucleic acid sequence 1 to 10, e.g., 3 to 5, base pairs upstream from that sequence. In an embodiment, an eaCas9 molecule of S. aureus recognizes the sequence motif NNGRRT (R=A or G) and directs cleavage of a target nucleic acid sequence 1 to 10, e.g., 3 to 5, base pairs upstream from that sequence. In an embodiment, an eaCas9 molecule of S. aureus recognizes the sequence motif NNGRRV (R=A or G, V=A, G or C) and directs cleavage of a target nucleic acid sequence 1 to 10, e.g., 3 to 5, base pairs upstream from that sequence. In an embodiment, an eaCas9 molecule of Neisseria meningitidis recognizes the sequence motif NNNNGATT or NNNGCTT and directs cleavage of a target nucleic acid sequence 1 to 10, e.g., 3 to 5, base pairs upstream from that sequence. See, e.g., Hou et al., PNAS Early Edition 2013, 1-6. The ability of a Cas9 molecule to recognize a PAM sequence can be determined, e.g., using a transformation assay described in Jinek et al., SCIENCE 2012 337:816. In the aforementioned embodiments, N can be any nucleotide residue, e.g., any of A, G, C or T.

[0854] As is discussed herein, Cas9 molecules can be engineered to alter the PAM specificity of the Cas9 molecule.

[0855] Exemplary naturally occurring Cas9 molecules are described in Chylinski et al., RNA BIOLOGY 2013 10:5, 727-737. Such Cas9 molecules include Cas9 molecules of a cluster 1 bacterial family, cluster 2 bacterial family, cluster 3 bacterial family, cluster 4 bacterial family, cluster 5 bacterial family, cluster 6 bacterial family, a cluster 7 bacterial family, a cluster 8 bacterial family, a cluster 9 bacterial family, a cluster 10 bacterial family, a cluster 11 bacterial family, a cluster 12 bacterial family, a cluster 13 bacterial family, a cluster 14 bacterial family, a cluster 15 bacterial family, a cluster 16 bacterial family, a cluster 17 bacterial family, a cluster 18 bacterial family, a cluster 19 bacterial family, a cluster 20 bacterial family, a cluster 21 bacterial family, a cluster 22 bacterial family, a cluster 23 bacterial family, a cluster 24 bacterial family, a cluster 25 bacterial family, a cluster 26 bacterial family, a cluster 27 bacterial family, a cluster 28 bacterial family, a cluster 29 bacterial family, a cluster 30 bacterial family, a cluster 31 bacterial family, a cluster 32 bacterial family, a cluster 33 bacterial family, a cluster 34 bacterial family, a cluster 35 bacterial family, a cluster 36 bacterial family, a cluster 37 bacterial family, a cluster 38 bacterial family, a cluster 39 bacterial family, a cluster 40 bacterial family, a cluster 41 bacterial family, a cluster 42 bacterial family, a cluster 43 bacterial family, a cluster 44 bacterial family, a cluster 45 bacterial family, a cluster 46 bacterial family, a cluster 47 bacterial family, a cluster 48 bacterial family, a cluster 49 bacterial family, a cluster 50 bacterial family, a cluster 51 bacterial family, a cluster 52 bacterial family, a cluster 53 bacterial family, a cluster 54 bacterial family, a cluster 55 bacterial family, a cluster 56 bacterial family, a cluster 57 bacterial family, a cluster 58 bacterial family, a cluster 59 bacterial family, a cluster 60 bacterial family, a cluster 61 bacterial family, a cluster 62 bacterial family, a cluster 63 bacterial family, a cluster 64 bacterial family, a cluster 65 bacterial family, a cluster 66 bacterial family, a cluster 67 bacterial family, a cluster 68 bacterial family, a cluster 69 bacterial family, a cluster 70 bacterial family, a cluster 71 bacterial family, a cluster 72 bacterial family, a cluster 73 bacterial family, a cluster 74 bacterial family, a cluster 75 bacterial family, a cluster 76 bacterial family, a cluster 77 bacterial family, or a cluster 78 bacterial family.

[0856] Exemplary naturally occurring Cas9 molecules include a Cas9 molecule of a cluster 1 bacterial family. Examples include a Cas9 molecule of: S. pyogenes (e.g., strain SF370, MGAS10270, MGAS10750, MGAS2096, MGAS315, MGAS5005, MGAS6180, MGAS9429, NZ131 and SSI-1), S. thermophilus (e.g., strain LMD-9), S. pseudoporcinus (e.g., strain SPIN 20026), S. mutans (e.g., strain UA159, NN2025), S. macacae (e.g., strain NCTC11558), S. gallolyticus (e.g., strain UCN34, ATCC BAA-2069), S. equines (e.g., strain ATCC 9812, MGCS 124), S. dysdalactiae (e.g., strain GGS 124), S. bovis (e.g., strain ATCC 700338), S. anginosus (e.g., strain F0211), S. agalactiae (e.g., strain NEM316, A909), Listeria monocytogenes (e.g., strain F6854), Listeria innocua (L. innocua, e.g., strain Clip11262), Enterococcus italicus (e.g., strain DSM 15952), or Enterococcus faecium (e.g., strain 1,231,408). Additional exemplary Cas9 molecules are a Cas9 molecule of Neisseria meningitides (Hou et al., PNAS Early Edition 2013, 1-6 and a S. aureus cas9 molecule.

[0857] In an embodiment, a Cas9 molecule or Cas9 polypeptide, e.g., an eaCas9 molecule or eaCas9 polypeptide, comprises an amino acid sequence:

[0858] having 60%, 65%, 70%, 75%, 80%, 85%, 90%, 95%, 96%, 97%, 98% or 99% homology with;

[0859] differs at no more than, 2, 5, 10, 15, 20, 30, or 40% of the amino acid residues when compared with;

[0860] differs by at least 1, 2, 5, 10 or 20 amino acids, but by no more than 100, 80, 70, 60, 50, 40 or 30 amino acids from; or

[0861] is identical to any Cas9 molecule sequence described herein, or a naturally occurring Cas9 molecule sequence, e.g., a Cas9 molecule from a species listed herein or described in Chylinski et al., RNA BIOLOGY 2013 10:5, 727-737; Hou et al., PNAS Early Edition 2013, 1-6; SEQ ID NO:1-4. In an embodiment, the Cas9 molecule or Cas9 polypeptide comprises one or more of the following activities: a nickase activity; a double stranded cleavage activity (e.g., an endonuclease and/or exonuclease activity); a helicase activity; or the ability, together with a gRNA molecule, to localize to a target nucleic acid.

[0862] In an embodiment, a Cas9 molecule or Cas9 polypeptide comprises any of the amino acid sequence of the consensus sequence of FIGS. 2A-2G, wherein “*” indicates any amino acid found in the corresponding position in the amino acid sequence of a Cas9 molecule of S. pyogenes, S. thermophilus, S. mutans and L. innocua, and “-” indicates any amino acid. In an embodiment, a Cas9 molecule or Cas9 polypeptide differs from the sequence of the consensus sequence disclosed in FIGS. 2A-2G by at least 1, but no more than 2, 3, 4, 5, 6, 7, 8, 9, or 10 amino acid residues. In an embodiment, a Cas9 molecule or Cas9 polypeptide comprises the amino acid sequence of SEQ ID NO:7 of FIGS. 7A-7B, wherein “*” indicates any amino acid found in the corresponding position in the amino acid sequence of a Cas9 molecule of S. pyogenes, or N. meningitides, “-” indicates any amino acid, and “-” indicates any amino acid or absent. In an embodiment, a Cas9 molecule or Cas9 polypeptide differs from the sequence of SEQ ID NO:6 or 7 disclosed in FIGS. 7A-7B by at least 1, but no more than 2, 3, 4, 5, 6, 7, 8, 9, or 10 amino acid residues.

[0863] A comparison of the sequence of a number of Cas9 molecules indicate that certain regions are conserved. These are identified below as:

[0864] region 1 (residues 1 to 180, or in the case of region 1′ residues 120 to 180)

[0865] region 2 (residues 360 to 480);

[0866] region 3 (residues 660 to 720);

[0867] region 4 (residues 817 to 900); and

[0868] region 5 (residues 900 to 960);

[0869] In an embodiment, a Cas9 molecule or Cas9 polypeptide comprises regions 1-5, together with sufficient additional Cas9 molecule sequence to provide a biologically active molecule, e.g., a Cas9 molecule having at least one activity described herein. In an embodiment, each of regions 1-5, independently, have 50%, 60%, 70%, 80%, 85%, 90%, 95%, 96%, 97%, 98% or 99% homology with the corresponding residues of a Cas9 molecule or Cas9 polypeptide described herein, e.g., a sequence from FIGS. 2A-2G or from FIGS. 7A-7B.

[0870] In an embodiment, a Cas9 molecule or Cas9 polypeptide, e.g., an eaCas9 molecule or eaCas9 polypeptide, comprises an amino acid sequence referred to as region 1:

[0871] having 50%, 60%, 70%, 80%, 85%, 90%, 95%, 96%, 97%, 98% or 99% homology with amino acids 1-180 (the numbering is according to the motif sequence in FIG. 2; 52% of residues in the four Cas9 sequences in FIGS. 2A-2G are conserved) of the amino acid sequence of Cas9 of S. pyogenes;

[0872] differs by at least 1, 2, 5, 10 or 20 amino acids but by no more than 90, 80, 70, 60, 50, 40 or 30 amino acids from amino acids 1-180 of the amino acid sequence of Cas9 of S. pyogenes, S. thermophilus, S. mutans or Listeria innocua; or

[0873] is identical to 1-180 of the amino acid sequence of Cas9 of S. pyogenes, S. thermophilus, S. mutans or L. innocua.

[0874] In an embodiment, a Cas9 molecule or Cas9 polypeptide, e.g., an eaCas9 molecule or eaCas9 polypeptide, comprises an amino acid sequence referred to as region 1′:

[0875] having 55%, 60%, 65%, 70%, 75%, 80%, 85%, 90%, 95%, 96%, 97%, 98% or 99% homology with amino acids 120-180 (55% of residues in the four Cas9 sequences in FIG. 2 are conserved) of the amino acid sequence of Cas9 of S. pyogenes, S. thermophilus, S. mutans or L. innocua;

[0876] differs by at least 1, 2, or 5 amino acids but by no more than 35, 30, 25, 20 or 10 amino acids from amino acids 120-180 of the amino acid sequence of Cas9 of S. pyogenes, S. thermophilus, S. mutans or L. innocua; or

[0877] is identical to 120-180 of the amino acid sequence of Cas9 of S. pyogenes, S. thermophilus, S. mutans or L. innocua.

[0878] In an embodiment, a Cas9 molecule or Cas9 polypeptide, e.g., an eaCas9 molecule or eaCas9 polypeptide, comprises an amino acid sequence referred to as region 2:

[0879] having 50%, 55%, 60%, 65%, 70%, 75%, 80%, 85%, 90%, 95%, 96%, 97%, 98% or 99% homology with amino acids 360-480 (52% of residues in the four Cas9 sequences in FIG. 2 are conserved) of the amino acid sequence of Cas9 of S. pyogenes, S. thermophilus, S. mutans or L. innocua;

[0880] differs by at least 1, 2, or 5 amino acids but by no more than 35, 30, 25, 20 or 10 amino acids from amino acids 360-480 of the amino acid sequence of Cas9 of S. pyogenes, S. thermophilus, S. mutans or L. innocua; or

[0881] is identical to 360-480 of the amino acid sequence of Cas9 of S. pyogenes, S. thermophilus, S. mutans or L. innocua.

[0882] In an embodiment, a Cas9 molecule or Cas9 polypeptide, e.g., an eaCas9 molecule or eaCas9 polypeptide, comprises an amino acid sequence referred to as region 3:

[0883] having 55%, 60%, 65%, 70%, 75%, 80%, 85%, 90%, 95%, 96%, 97%, 98%, or 99% homology with amino acids 660-720 (56% of residues in the four Cas9 sequences in FIG. 2 are conserved) of the amino acid sequence of Cas9 of S. pyogenes, S. thermophilus, S. mutans or L. innocua;

[0884] differs by at least 1, 2, or 5 amino acids but by no more than 35, 30, 25, 20 or 10 amino acids from amino acids 660-720 of the amino acid sequence of Cas9 of S. pyogenes, S. thermophilus, S. mutans or L. innocua; or

[0885] is identical to 660-720 of the amino acid sequence of Cas9 of S. pyogenes, S. thermophilus, S. mutans or L. innocua.

[0886] In an embodiment, a Cas9 molecule or Cas9 polypeptide, e.g., an eaCas9 molecule or eaCas9 polypeptide, comprises an amino acid sequence referred to as region 4:

[0887] having 50%, 55%, 60%, 65%, 70%, 75%, 80%, 85%, 90%, 95%, 96%, 97%, 98%, or 99% homology with amino acids 817-900 (55% of residues in the four Cas9 sequences in FIGS. 2A-2G are conserved) of the amino acid sequence of Cas9 of S. pyogenes, S. thermophilus, S. mutans or L. innocua;

[0888] differs by at least 1, 2, or 5 amino acids but by no more than 35, 30, 25, 20 or 10 amino acids from amino acids 817-900 of the amino acid sequence of Cas9 of S. pyogenes, S. thermophilus, S. mutans or L. innocua; or

[0889] is identical to 817-900 of the amino acid sequence of Cas9 of S. pyogenes, S. thermophilus, S. mutans or L. innocua.

[0890] In an embodiment, a Cas9 molecule or Cas9 polypeptide, e.g., an eaCas9 molecule or eaCas9 polypeptide, comprises an amino acid sequence referred to as region 5:

[0891] having 50%, 55%, 60%, 65%, 70%, 75%, 80%, 85%, 90%, 95%, 96%, 97%, 98%, or 99% homology with amino acids 900-960 (60% of residues in the four Cas9 sequences in FIGS. 2A-2G are conserved) of the amino acid sequence of Cas9 of S. pyogenes, S. thermophilus, S. mutans or L. innocua;

[0892] differs by at least 1, 2, or 5 amino acids but by no more than 35, 30, 25, 20 or 10 amino acids from amino acids 900-960 of the amino acid sequence of Cas9 of S. pyogenes, S. thermophilus, S. mutans or L. innocua; or

[0893] is identical to 900-960 of the amino acid sequence of Cas9 of S. pyogenes, S. thermophilus, S. mutans or L. innocua.

[0894] Engineered or Altered Cas9 Molecules and Cas9 Polypeptides

[0895] Cas9 molecules and Cas9 polypeptides described herein, e.g., naturally occurring Cas9 molecules, can possess any of a number of properties, including: nickase activity, nuclease activity (e.g., endonuclease and/or exonuclease activity); helicase activity; the ability to associate functionally with a gRNA molecule; and the ability to target (or localize to) a site on a nucleic acid (e.g., PAM recognition and specificity). In an embodiment, a Cas9 molecule or Cas9 polypeptide can include all or a subset of these properties. In typical embodiments, a Cas9 molecule or Cas9 polypeptide have the ability to interact with a gRNA molecule and, in concert with the gRNA molecule, localize to a site in a nucleic acid. Other activities, e.g., PAM specificity, cleavage activity, or helicase activity can vary more widely in Cas9 molecules and Cas9 polypeptides.

[0896] Cas9 molecules include engineered Cas9 molecules and engineered Cas9 polypeptides (engineered, as used in this context, means merely that the Cas9 molecule or Cas9 polypeptide differs from a reference sequences, and implies no process or origin limitation). An engineered Cas9 molecule or Cas9 polypeptide can comprise altered enzymatic properties, e.g., altered nuclease activity, (as compared with a naturally occurring or other reference Cas9 molecule) or altered helicase activity. As discussed herein, an engineered Cas9 molecule or Cas9 polypeptide can have nickase activity (as opposed to double strand nuclease activity). In an embodiment an engineered Cas9 molecule or Cas9 polypeptide can have an alteration that alters its size, e.g., a deletion of amino acid sequence that reduces its size, e.g., without significant effect on one or more, or any Cas9 activity. In an embodiment, an engineered Cas9 molecule or Cas9 polypeptide can comprise an alteration that affects PAM recognition. E.g., an engineered Cas9 molecule can be altered to recognize a PAM sequence other than that recognized by the endogenous wild-type PI domain. In an embodiment, a Cas9 molecule or Cas9 polypeptide can differ in sequence from a naturally occurring Cas9 molecule but not have significant alteration in one or more Cas9 activities.

[0897] Cas9 molecules or Cas9 polypeptides with desired properties can be made in a number of ways, e.g., by alteration of a parental, e.g., naturally occurring Cas9 molecules or Cas9 polypeptides to provide an altered Cas9 molecule or Cas9 polypeptide having a desired property. For example, one or more mutations or differences relative to a parental Cas9 molecule, e.g., a naturally occurring or engineered Cas9 molecule, can be introduced. Such mutations and differences comprise: substitutions (e.g., conservative substitutions or substitutions of non-essential amino acids); insertions; or deletions. In an embodiment, a Cas9 molecule or Cas9 polypeptide can comprises one or more mutations or differences, e.g., at least 1, 2, 3, 4, 5, 10, 15, 20, 30, 40 or 50 mutations, but less than 200, 100, or 80 mutations relative to a reference, e.g., a parental, Cas9 molecule.

[0898] In an embodiment, a mutation or mutations do not have a substantial effect on a Cas9 activity, e.g. a Cas9 activity described herein. In an embodiment, a mutation or mutations have a substantial effect on a Cas9 activity, e.g. a Cas9 activity described herein.

[0899] Non-Cleaving and Modified-Cleavage Cas9 Molecules and Cas9 Polypeptides

[0900] In an embodiment, a Cas9 molecule or Cas9 polypeptide comprises a cleavage property that differs from naturally occurring Cas9 molecules, e.g., that differs from the naturally occurring Cas9 molecule having the closest homology. For example, a Cas9 molecule or Cas9 polypeptide can differ from naturally occurring Cas9 molecules, e.g., a Cas9 molecule of S. pyogenes, as follows: its ability to modulate, e.g., decreased or increased, cleavage of a double stranded nucleic acid (endonuclease and/or exonuclease activity), e.g., as compared to a naturally occurring Cas9 molecule (e.g., a Cas9 molecule of S. pyogenes); its ability to modulate, e.g., decreased or increased, cleavage of a single strand of a nucleic acid, e.g., a non-complementary strand of a nucleic acid molecule or a complementary strand of a nucleic acid molecule (nickase activity), e.g., as compared to a naturally occurring Cas9 molecule (e.g., a Cas9 molecule of S. pyogenes); or the ability to cleave a nucleic acid molecule, e.g., a double stranded or single stranded nucleic acid molecule, can be eliminated.

[0901] Modified Cleavage eaCas9 Molecules and eaCas9 Polypeptides

[0902] In an embodiment, an eaCas9 molecule or eaCas9 polypeptide comprises one or more of the following activities: cleavage activity associated with an N-terminal RuvC-like domain; cleavage activity associated with an HNH-like domain; cleavage activity associated with an HNH-like domain and cleavage activity associated with an N-terminal RuvC-like domain.

[0903] In an embodiment, an eaCas9 molecule or eaCas9 polypeptide comprises an active, or cleavage competent, HNH-like domain (e.g., an HNH-like domain described herein, e.g., SEQ ID NO: 17, SEQ ID NO: 18, SEQ ID NO: 19, SEQ ID NO: 20 or SEQ ID NO: 21) and an inactive, or cleavage incompetent, N-terminal RuvC-like domain. An exemplary inactive, or cleavage incompetent N-terminal RuvC-like domain can have a mutation of an aspartic acid in an N-terminal RuvC-like domain, e.g., an aspartic acid at position 9 of the consensus sequence disclosed in FIGS. 2A-2G or an aspartic acid at position 10 of SEQ ID NO: 7, e.g., can be substituted with an alanine. In an embodiment, the eaCas9 molecule or eaCas9 polypeptide differs from wild type in the N-terminal RuvC-like domain and does not cleave the target nucleic acid, or cleaves with significantly less efficiency, e.g., less than 20, 10, 5, 1 or 0.1% of the cleavage activity of a reference Cas9 molecule, e.g., as measured by an assay described herein. The reference Cas9 molecule can by a naturally occurring unmodified Cas9 molecule, e.g., a naturally occurring Cas9 molecule such as a Cas9 molecule of S. pyogenes, or S. thermophilus. In an embodiment, the reference Cas9 molecule is the naturally occurring Cas9 molecule having the closest sequence identity or homology.

[0904] In an embodiment, an eaCas9 molecule or eaCas9 polypeptide comprises an inactive, or cleavage incompetent, HNH domain and an active, or cleavage competent, N-terminal RuvC-like domain (e.g., a RuvC-like domain described herein, e.g., SEQ ID NO: 8, SEQ ID NO: 9, SEQ ID NO: 10, SEQ ID NO: 11, SEQ ID NO: 12, SEQ ID NO: 13, SEQ ID NO: 14, SEQ ID NO: 15, or SEQ ID NO: 16). Exemplary inactive, or cleavage incompetent HNH-like domains can have a mutation at one or more of: a histidine in an HNH-like domain, e.g., a histidine shown at position 856 of the consensus sequence disclosed in FIGS. 2A-2G, e.g., can be substituted with an alanine; and one or more asparagines in an HNH-like domain, e.g., an asparagine shown at position 870 of the consensus sequence disclosed in FIGS. 2A-2G and/or at position 879 of the consensus sequence disclosed in FIGS. 2A-2G, e.g., can be substituted with an alanine. In an embodiment, the eaCas9 differs from wild type in the HNH-like domain and does not cleave the target nucleic acid, or cleaves with significantly less efficiency, e.g., less than 20, 10, 5, 1 or 0.1% of the cleavage activity of a reference Cas9 molecule, e.g., as measured by an assay described herein. The reference Cas9 molecule can by a naturally occurring unmodified Cas9 molecule, e.g., a naturally occurring Cas9 molecule such as a Cas9 molecule of S. pyogenes, or S. thermophilus. In an embodiment, the reference Cas9 molecule is the naturally occurring Cas9 molecule having the closest sequence identity or homology.

[0905] Alterations in the Ability to Cleave One or Both Strands of a Target Nucleic Acid

[0906] In an embodiment, exemplary Cas9 activities comprise one or more of PAM specificity, cleavage activity, and helicase activity. A mutation(s) can be present, e.g., in one or more RuvC-like domain, e.g., an N-terminal RuvC-like domain; an HNH-like domain; a region outside the RuvC-like domains and the HNH-like domain. In some embodiments, a mutation(s) is present in a RuvC-like domain, e.g., an N-terminal RuvC-like domain. In some embodiments, a mutation(s) is present in an HNH-like domain. In some embodiments, mutations are present in both a RuvC-like domain, e.g., an N-terminal RuvC-like domain and an HNH-like domain.

[0907] Exemplary mutations that may be made in the RuvC domain or HNH domain with reference to the S. pyogenes sequence include: D10A, E762A, H840A, N854A, N863A and/or D986A.

[0908] In an embodiment, a Cas9 molecule or Cas9 polypeptide is an eiCas9 molecule or eiCas9 polypeptide comprising one or more differences in a RuvC domain and/or in an HNH domain as compared to a reference Cas9 molecule, and the eiCas9 molecule or eiCas9 polypeptide does not cleave a nucleic acid, or cleaves with significantly less efficiency than does wildtype, e.g., when compared with wild type in a cleavage assay, e.g., as described herein, cuts with less than 50, 25, 10, or 1% of a reference Cas9 molecule, as measured by an assay described herein.

[0909] Whether or not a particular sequence, e.g., a substitution, may affect one or more activity, such as targeting activity, cleavage activity, etc., can be evaluated or predicted, e.g., by evaluating whether the mutation is conservative or by the method described in Section IV. In an embodiment, a “non-essential” amino acid residue, as used in the context of a Cas9 molecule, is a residue that can be altered from the wild-type sequence of a Cas9 molecule, e.g., a naturally occurring Cas9 molecule, e.g., an eaCas9 molecule, without abolishing or more preferably, without substantially altering a Cas9 activity (e.g., cleavage activity), whereas changing an “essential” amino acid residue results in a substantial loss of activity (e.g., cleavage activity).

[0910] In an embodiment, a Cas9 molecule or Cas9 polypeptide comprises a cleavage property that differs from naturally occurring Cas9 molecules, e.g., that differs from the naturally occurring Cas9 molecule having the closest homology. For example, a Cas9 molecule or Cas9 polypeptide can differ from naturally occurring Cas9 molecules, e.g., a Cas9 molecule of S aureus, S. pyogenes, or C. jejuni as follows: its ability to modulate, e.g., decreased or increased, cleavage of a double stranded break (endonuclease and/or exonuclease activity), e.g., as compared to a naturally occurring Cas9 molecule (e.g., a Cas9 molecule of S aureus, S. pyogenes, or C. jejuni); its ability to modulate, e.g., decreased or increased, cleavage of a single strand of a nucleic acid, e.g., a non-complimentary strand of a nucleic acid molecule or a complementary strand of a nucleic acid molecule (nickase activity), e.g., as compared to a naturally occurring Cas9 molecule (e.g., a Cas9 molecule of S aureus, S. pyogenes, or C. jejuni); or the ability to cleave a nucleic acid molecule, e.g., a double stranded or single stranded nucleic acid molecule, can be eliminated.

[0911] In an embodiment, the altered Cas9 molecule or Cas9 polypeptide is an eaCas9 molecule or eaCas9 polypeptide comprising one or more of the following activities: cleavage activity associated with a RuvC domain; cleavage activity associated with an HNH domain; cleavage activity associated with an HNH domain and cleavage activity associated with a RuvC domain.

[0912] In an embodiment, the altered Cas9 molecule or Cas9 polypeptide is an eiCas9 molecule or eiCas9 polypeptide which does not cleave a nucleic acid molecule (either double stranded or single stranded nucleic acid molecules) or cleaves a nucleic acid molecule with significantly less efficiency, e.g., less than 20, 10, 5, 1 or 0.1% of the cleavage activity of a reference Cas9 molecule, e.g., as measured by an assay described herein. The reference Cas9 molecule can be a naturally occurring unmodified Cas9 molecule, e.g., a naturally occurring Cas9 molecule such as a Cas9 molecule of S. pyogenes, S. thermophilus, S. aureus, C. jejuni or N. meningitidis. In an embodiment, the reference Cas9 molecule is the naturally occurring Cas9 molecule having the closest sequence identity or homology. In an embodiment, the eiCas9 molecule or eiCas9 polypeptide lacks substantial cleavage activity associated with a RuvC domain and cleavage activity associated with an HNH domain.

[0913] In an embodiment, the altered Cas9 molecule or Cas9 polypeptide is an eaCas9 molecule or eaCas9 polypeptide comprising the fixed amino acid residues of S. pyogenes shown in the consensus sequence disclosed in FIGS. 2A-2G, and has one or more amino acids that differ from the amino acid sequence of S. pyogenes (e.g., has a substitution) at one or more residue (e.g., 2, 3, 5, 10, 15, 20, 30, 50, 70, 80, 90, 100, 200 amino acid residues) represented by an “-” in the consensus sequence disclosed in FIGS. 2A-2G or SEQ ID NO: 7.

[0914] In an embodiment, the altered Cas9 molecule or Cas9 polypeptide comprises a sequence in which:

[0915] the sequence corresponding to the fixed sequence of the consensus sequence disclosed in FIGS. 2A-2G differs at no more than 1, 2, 3, 4, 5, 10, 15, or 20% of the fixed residues in the consensus sequence disclosed in FIGS. 2A-2G;
[0916] the sequence corresponding to the residues identified by “*” in the consensus sequence disclosed in FIGS. 2A-2G differ at no more than 1, 2, 3, 4, 5, 10, 15, 20, 25, 30, 35, or 40% of the “*” residues from the corresponding sequence of naturally occurring Cas9 molecule, e.g., an S. pyogenes Cas9 molecule; and, the sequence corresponding to the residues identified by “-” in the consensus sequence disclosed in FIGS. 2A-2G differ at no more than 5, 10, 15, 20, 25, 30, 35, 40, 45, 55, or 60% of the “-” residues from the corresponding sequence of naturally occurring Cas9 molecule, e.g., an S. pyogenes Cas9 molecule.

[0917] In an embodiment, the altered Cas9 molecule or Cas9 polypeptide is an eaCas9 molecule or eaCas9 polypeptide comprising the fixed amino acid residues of S. thermophilus shown in the consensus sequence disclosed in FIGS. 2A-2G, and has one or more amino acids that differ from the amino acid sequence of S. thermophilus (e.g., has a substitution) at one or more residue (e.g., 2, 3, 5, 10, 15, 20, 30, 50, 70, 80, 90, 100, 200 amino acid residues) represented by an “-” in the consensus sequence disclosed in FIGS. 2A-2G.

[0918] In an embodiment, the altered Cas9 molecule or Cas9 polypeptide comprises a sequence in which:

[0919] the sequence corresponding to the fixed sequence of the consensus sequence disclosed in FIGS. 2A-2G differs at no more than 1, 2, 3, 4, 5, 10, 15, or 20% of the fixed residues in the consensus sequence disclosed in FIGS. 2A-2G;

[0920] the sequence corresponding to the residues identified by “*” in the consensus sequence disclosed in FIGS. 2A-2G differ at no more than 1, 2, 3, 4, 5, 10, 15, 20, 25, 30, 35, or 40% of the “*” residues from the corresponding sequence of naturally occurring Cas9 molecule, e.g., an S. thermophilus Cas9 molecule; and,

[0921] the sequence corresponding to the residues identified by “-” in the consensus sequence disclosed in FIGS. 2A-2G differ at no more than 5, 10, 15, 20, 25, 30, 35, 40, 45, 55, or 60% of the “-” residues from the corresponding sequence of naturally occurring Cas9 molecule, e.g., an S. thermophilus Cas9 molecule.

[0922] In an embodiment, the altered Cas9 molecule or Cas9 polypeptide is an eaCas9 molecule or eaCas9 polypeptide comprising the fixed amino acid residues of S. mutans shown in the consensus sequence disclosed in FIGS. 2A-2G, and has one or more amino acids that differ from the amino acid sequence of S. mutans (e.g., has a substitution) at one or more residue (e.g., 2, 3, 5, 10, 15, 20, 30, 50, 70, 80, 90, 100, 200 amino acid residues) represented by an “-” in the consensus sequence disclosed in FIGS. 2A-2G.

[0923] In an embodiment, the altered Cas9 molecule or Cas9 polypeptide comprises a sequence in which:

[0924] the sequence corresponding to the fixed sequence of the consensus sequence disclosed in FIGS. 2A-2G differs at no more than 1, 2, 3, 4, 5, 10, 15, or 20% of the fixed residues in the consensus sequence disclosed in FIGS. 2A-2G;

[0925] the sequence corresponding to the residues identified by “*” in the consensus sequence disclosed in FIGS. 2A-2G differ at no more than 1, 2, 3, 4, 5, 10, 15, 20, 25, 30, 35, or 40% of the “*” residues from the corresponding sequence of naturally occurring Cas9 molecule, e.g., an S. mutans Cas9 molecule; and,

[0926] the sequence corresponding to the residues identified by “-” in the consensus sequence disclosed in FIGS. 2A-2G differ at no more than 5, 10, 15, 20, 25, 30, 35, 40, 45, 55, or 60% of the “-” residues from the corresponding sequence of naturally occurring Cas9 molecule, e.g., an S. mutans Cas9 molecule.

[0927] In an embodiment, the altered Cas9 molecule or Cas9 polypeptide is an eaCas9 molecule or eaCas9 polypeptide comprising the fixed amino acid residues of L. innocula shown in the consensus sequence disclosed in FIGS. 2A-2G, and has one or more amino acids that differ from the amino acid sequence of L. innocula (e.g., has a substitution) at one or more residue (e.g., 2, 3, 5, 10, 15, 20, 30, 50, 70, 80, 90, 100, 200 amino acid residues) represented by an “-” in the consensus sequence disclosed in FIGS. 2A-2G.

[0928] In an embodiment, the altered Cas9 molecule or Cas9 polypeptide comprises a sequence in which:

[0929] the sequence corresponding to the fixed sequence of the consensus sequence disclosed in FIGS. 2A-2G differs at no more than 1, 2, 3, 4, 5, 10, 15, or 20% of the fixed residues in the consensus sequence disclosed in FIGS. 2A-2G;

[0930] the sequence corresponding to the residues identified by “*” in the consensus sequence disclosed in FIGS. 2A-2G differ at no more than 1, 2, 3, 4, 5, 10, 15, 20, 25, 30, 35, or 40% of the “*” residues from the corresponding sequence of naturally occurring Cas9 molecule, e.g., an L. innocula Cas9 molecule; and,

[0931] the sequence corresponding to the residues identified by “-” in the consensus sequence disclosed in FIGS. 2A-2G differ at no more than 5, 10, 15, 20, 25, 30, 35, 40, 45, 55, or 60% of the “-” residues from the corresponding sequence of naturally occurring Cas9 molecule, e.g., an L. innocula Cas9 molecule.

[0932] In an embodiment, the altered Cas9 molecule or Cas9 polypeptide, e.g., an eaCas9 molecule or eaCas9 polypeptide, can be a fusion, e.g., of two of more different Cas9 molecules, e.g., of two or more naturally occurring Cas9 molecules of different species. For example, a fragment of a naturally occurring Cas9 molecule of one species can be fused to a fragment of a Cas9 molecule of a second species. As an example, a fragment of a Cas9 molecule of S. pyogenes comprising an N-terminal RuvC-like domain can be fused to a fragment of Cas9 molecule of a species other than S. pyogenes (e.g., S. thermophilus) comprising an HNH-like domain.

[0933] Cas9 Molecules and Cas9 Polypeptides with Altered PAM Recognition or No PAM Recognition

[0934] Naturally occurring Cas9 molecules can recognize specific PAM sequences, for example, the PAM recognition sequences described above for S. pyogenes, S. thermophiles, S. mutans, S. aureus and N. meningitides.

[0935] In an embodiment, a Cas9 molecule or Cas9 polypeptide has the same PAM specificities as a naturally occurring Cas9 molecule. In other embodiments, a Cas9 molecule or Cas9 polypeptide has a PAM specificity not associated with a naturally occurring Cas9 molecule, or a PAM specificity not associated with the naturally occurring Cas9 molecule to which it has the closest sequence homology. For example, a naturally occurring Cas9 molecule can be altered, e.g., to alter PAM recognition, e.g., to alter the PAM sequence that the Cas9 molecule recognizes to decrease off target sites and/or improve specificity; or eliminate a PAM recognition requirement. In an embodiment, a Cas9 molecule or Cas9 polypeptide can be altered, e.g., to increase length of PAM recognition sequence and/or improve Cas9 specificity to high level of identity (e.g., 98%, 99% or 100% match between gRNA and a PAM sequence), e.g., to decrease off target sites and increase specificity. In an embodiment, the length of the PAM recognition sequence is at least 4, 5, 6, 7, 8, 9, 10 or 15 amino acids in length. In an embodiment, the Cas9 specificity requires at least 90%, 95%, 96%, 97%, 98%, 99% or more homology between the gRNA and the PAM sequence. Cas9 molecules or Cas9 polypeptides that recognize different PAM sequences and/or have reduced off-target activity can be generated using directed evolution. Exemplary methods and systems that can be used for directed evolution of Cas9 molecules are described, e.g., in Esvelt et al. NATURE 2011, 472(7344): 499-503. Candidate Cas9 molecules can be evaluated, e.g., by methods described in Section IV.

[0936] Alterations of the PI domain, which mediates PAM recognition, are discussed below.

[0937] Synthetic Cas9 Molecules and Cas9 Polypeptides with Altered PI Domains

[0938] Current genome-editing methods are limited in the diversity of target sequences that can be targeted by the PAM sequence that is recognized by the Cas9 molecule utilized. A synthetic Cas9 molecule (or Syn-Cas9 molecule), or synthetic Cas9 polypeptide (or Syn-Cas9 polypeptide), as that term is used herein, refers to a Cas9 molecule or Cas9 polypeptide that comprises a Cas9 core domain from one bacterial species and a functional altered PI domain, i.e., a PI domain other than that naturally associated with the Cas9 core domain, e.g., from a different bacterial species.

[0939] In an embodiment, the altered PI domain recognizes a PAM sequence that is different from the PAM sequence recognized by the naturally-occurring Cas9 from which the Cas9 core domain is derived. In an embodiment, the altered PI domain recognizes the same PAM sequence recognized by the naturally-occurring Cas9 from which the Cas9 core domain is derived, but with different affinity or specificity. A Syn-Cas9 molecule or Syn-Cas9 polypeptide can be, respectively, a Syn-eaCas9 molecule or Syn-eaCas9 polypeptide or a Syn-eiCas9 molecule Syn-eiCas9 polypeptide.

[0940] An exemplary Syn-Cas9 molecule or Syn-Cas9 polypeptide comprises:

[0941] a) a Cas9 core domain, e.g., a Cas9 core domain from Table 8 or 9, e.g., a S. aureus, S. pyogenes, or C. jejuni Cas9 core domain; and

[0942] b) an altered PI domain from a species X Cas9 sequence selected from Tables 11 and 12.

[0943] In an embodiment, the RKR motif (the PAM binding motif) of said altered PI domain comprises: differences at 1, 2, or 3 amino acid residues; a difference in amino acid sequence at the first, second, or third position; differences in amino acid sequence at the first and second positions, the first and third positions, or the second and third positions; as compared with the sequence of the RKR motif of the native or endogenous PI domain associated with the Cas9 core domain.

[0944] In an embodiment, the Cas9 core domain comprises the Cas9 core domain from a species X Cas9 from Table 8 and said altered PI domain comprises a PI domain from a species Y Cas9 from Table 8.

[0945] In an embodiment, the RKR motif of the species X Cas9 is other than the RKR motif of the species Y Cas9.

[0946] In an embodiment, the RKR motif of the altered PI domain is selected from XXY, XNG, and XNQ.

[0947] In an embodiment, the altered PI domain has at least 60, 70, 80, 90, 95, or 100% homology with the amino acid sequence of a naturally occurring PI domain of said species Y from Table 8.

[0948] In an embodiment, the altered PI domain differs by no more than 50, 40, 30, 25, 20, 15, 10, 5, 4, 3, 2, or 1 amino acid residue from the amino acid sequence of a naturally occurring PI domain of said second species from Table 8.

[0949] In an embodiment, the Cas9 core domain comprises a S. aureus core domain and altered PI domain comprises: an A. denitrificans PI domain; a C. jejuni PI domain; a H. mustelae PI domain; or an altered PI domain of species X PI domain, wherein species X is selected from Table 12.

[0950] In an embodiment, the Cas9 core domain comprises a S. pyogenes core domain and the altered PI domain comprises: an A. denitrificans PI domain; a C. jejuni PI domain; a H. mustelae PI domain; or an altered PI domain of species X PI domain, wherein species X is selected from Table 12.

[0951] In an embodiment, the Cas9 core domain comprises a C. jejuni core domain and the altered PI domain comprises: an A. denitrificans PI domain; a H. mustelae PI domain; or an altered PI domain of species X PI domain, wherein species X is selected from Table 12.

[0952] In an embodiment, the Cas9 molecule or Cas9 polypeptide further comprises a linker disposed between said Cas9 core domain and said altered PI domain.

[0953] In an embodiment, the linker comprises: a linker described elsewhere herein disposed between the Cas9 core domain and the heterologous PI domain. Suitable linkers are further described in Section V.

[0954] Exemplary altered PI domains for use in Syn-Cas9 molecules are described in Tables 11 and 12. The sequences for the 83 Cas9 orthologs referenced in Tables 11 and 12 are provided in Table 8. Table 10 provides the Cas9 orthologs with known PAM sequences and the corresponding RKR motif.

[0955] In an embodiment, a Syn-Cas9 molecule or Syn-Cas9 polypeptide may also be size-optimized, e.g., the Syn-Cas9 molecule or Syn-Cas9 polypeptide comprises one or more deletions, and optionally one or more linkers disposed between the amino acid residues flanking the deletions. In an embodiment, a Syn-Cas9 molecule or Syn-Cas9 polypeptide comprises a REC deletion.

[0956] Size-Optimized Cas9 Molecules and Cas9 Polypeptides

[0957] Engineered Cas9 molecules and engineered Cas9 polypeptides described herein include a Cas9 molecule or Cas9 polypeptide comprising a deletion that reduces the size of the molecule while still retaining desired Cas9 properties, e.g., essentially native conformation, Cas9 nuclease activity, and/or target nucleic acid molecule recognition. Provided herein are Cas9 molecules or Cas9 polypeptides comprising one or more deletions and optionally one or more linkers, wherein a linker is disposed between the amino acid residues that flank the deletion. Methods for identifying suitable deletions in a reference Cas9 molecule, methods for generating Cas9 molecules with a deletion and a linker, and methods for using such Cas9 molecules will be apparent to one of ordinary skill in the art upon review of this document.

[0958] A Cas9 molecule, e.g., a S. aureus, S. pyogenes, or C. jejuni, Cas9 molecule, having a deletion is smaller, e.g., has reduced number of amino acids, than the corresponding naturally-occurring Cas9 molecule. The smaller size of the Cas9 molecules allows increased flexibility for delivery methods, and thereby increases utility for genome-editing. A Cas9 molecule or Cas9 polypeptide can comprise one or more deletions that do not substantially affect or decrease the activity of the resultant Cas9 molecules or Cas9 polypeptides described herein. Activities that are retained in the Cas9 molecules or Cas9 polypeptides comprising a deletion as described herein include one or more of the following:

[0959] a nickase activity, i.e., the ability to cleave a single strand, e.g., the non-complementary strand or the complementary strand, of a nucleic acid molecule; a double stranded nuclease activity, i.e., the ability to cleave both strands of a double stranded nucleic acid and create a double stranded break, which in an embodiment is the presence of two nickase activities;

[0960] an endonuclease activity;

[0961] an exonuclease activity;

[0962] a helicase activity, i.e., the ability to unwind the helical structure of a double stranded nucleic acid;

[0963] and recognition activity of a nucleic acid molecule, e.g., a target nucleic acid or a gRNA.

[0964] Activity of the Cas9 molecules or Cas9 polypeptides described herein can be assessed using the activity assays described herein or in the art.

[0965] Identifying Regions Suitable for Deletion

[0966] Suitable regions of Cas9 molecules for deletion can be identified by a variety of methods. Naturally-occurring orthologous Cas9 molecules from various bacterial species, e.g., any one of those listed in Table 8, can be modeled onto the crystal structure of S. pyogenes Cas9 (Nishimasu et al., Cell, 156:935-949, 2014) to examine the level of conservation across the selected Cas9 orthologs with respect to the three-dimensional conformation of the protein. Less conserved or unconserved regions that are spatially located distant from regions involved in Cas9 activity, e.g., interface with the target nucleic acid molecule and/or gRNA, represent regions or domains are candidates for deletion without substantially affecting or decreasing Cas9 activity.

[0967] REC-Optimized Cas9 Molecules and Cas9 Polypeptides

[0968] A REC-optimized Cas9 molecule, or a REC-optimized Cas9 polypeptide, as that term is used herein, refers to a Cas9 molecule or Cas9 polypeptide that comprises a deletion in one or both of the REC2 domain and the RE1_{CT} domain (collectively a REC deletion), wherein the deletion comprises at least 10% of the amino acid residues in the cognate domain. A REC-optimized Cas9 molecule or Cas9 polypeptide can be an eaCas9 molecule or eaCas9 polypeptide, or an eiCas9 molecule or eiCas9 polypeptide. An exemplary REC-optimized Cas9 molecule or REC-optimized Cas9 polypeptide comprises:

[0969] a) a deletion selected from:
[0970] i) a REC2 deletion;
[0971] ii) a REC1_{CT} deletion; or
[0972] iii) a REC1_{SUB} deletion.

[0973] Optionally, a linker is disposed between the amino acid residues that flank the deletion. In an embodiment, a Cas9 molecule or Cas9 polypeptide includes only one deletion, or only two deletions. A Cas9 molecule or Cas9 polypeptide can comprise a REC2 deletion and a REC1_{CT} deletion. A Cas9 molecule or Cas9 polypeptide can comprise a REC2 deletion and a REC1_{SUB} deletion.

[0974] Generally, the deletion will contain at least 10% of the amino acids in the cognate domain, e.g., a REC2 deletion will include at least 10% of the amino acids in the REC2 domain.

[0975] A deletion can comprise: at least 10, 20, 30, 40, 50, 60, 70, 80, or 90% of the amino acid residues of its cognate domain; all of the amino acid residues of its cognate domain; an amino acid residue outside its cognate domain; a plurality of amino acid residues outside its cognate domain; the amino acid residue immediately N terminal to its cognate domain; the amino acid residue immediately C terminal to its cognate domain; the amino acid residue immediately N terminal to its cognate and the amino acid residue immediately C terminal to its cognate domain; a plurality of, e.g., up to 5, 10, 15, or 20, amino acid residues N terminal to its cognate domain; a plurality of, e.g., up to 5, 10, 15, or 20, amino acid residues C terminal to its cognate domain; a plurality of, e.g., up to 5, 10, 15, or 20, amino acid residues N terminal to its cognate domain and a plurality of e.g., up to 5, 10, 15, or 20, amino acid residues C terminal to its cognate domain.

[0976] In an embodiment, a deletion does not extend beyond: its cognate domain; the N terminal amino acid residue of its cognate domain; the C terminal amino acid residue of its cognate domain.

[0977] A REC-optimized Cas9 molecule or REC-optimized Cas9 polypeptide can include a linker disposed between the amino acid residues that flank the deletion. Any linkers known in the art that maintain the conformation or native fold of the Cas9 molecule (thereby retaining Cas9 activity) can be used between the amino acid resides that flank a REC deletion in a REC-optimized Cas9 molecule or REC-optimized Cas9 polypeptide. Linkers for use in generating recombinant proteins, e.g., multi-domain proteins, are known in the art (Chen et al., Adv Drug Delivery Rev, 65:1357-69, 2013).

[0978] In an embodiment, a REC-optimized Cas9 molecule or REC-optimized Cas9 polypeptide comprises an amino acid sequence that, other than any REC deletion and associated linker, has at least 50, 55, 60, 65, 70, 75, 80, 85, 90, 95, 99, or 100% homology with the amino acid sequence of a naturally occurring Cas9, e.g., a Cas9 molecule described in Table 8, e.g., a S. aureus Cas9 molecule, a S. pyogenes Cas9 molecule, or a C. jejuni Cas9 molecule.

[0979] In an embodiment, a REC-optimized Cas9 molecule or REC-optimized Cas9 polypeptide comprises an amino acid sequence that, other than any REC deletion and associated linker, differs by no more than 1, 2, 3, 4, 5, 6, 7, 8, 9, 10, 15, 20, or 25, amino acid residues from the amino acid sequence of a naturally occurring Cas 9, e.g., a Cas9 molecule described in Table 8, e.g., a S. aureus Cas9 molecule, a S. pyogenes Cas9 molecule, or a C. jejuni Cas9 molecule.

[0980] In an embodiment, a REC-optimized Cas9 molecule or REC-optimized Cas9 polypeptide comprises an amino acid sequence that, other than any REC deletion and associate linker, differs by no more than 1, 2, 3, 4, 5, 6, 7, 8, 9, 10, 15, 20, or 25% of the, amino acid residues from the amino acid sequence of a naturally occurring Cas 9, e.g., a Cas9 molecule described in Table 8, e.g., a S. aureus Cas9 molecule, a S. pyogenes Cas9 molecule, or a C. jejuni Cas9 molecule.

[0981] For sequence comparison, typically one sequence acts as a reference sequence, to which test sequences are compared. When using a sequence comparison algorithm, test and reference sequences are entered into a computer, subsequence coordinates are designated, if necessary, and sequence algorithm program parameters are designated. Default program parameters can be used, or alternative parameters can be designated. The sequence comparison algorithm then calculates the percent sequence identities for the test sequences relative to the reference sequence, based on the program parameters. Methods of alignment of sequences for comparison are well known in the art. Optimal alignment of sequences for comparison can be conducted, e.g., by the local homology algorithm of Smith and Waterman, (1970) Adv. Appl. Math. 2:482c, by the homology alignment algorithm of Needleman and Wunsch, (1970) J. Mol. Biol. 48:443, by the search for similarity method of Pearson and Lipman, (1988) Proc. Nat'l. Acad. Sci. USA 85:2444, by computerized implementations of these algorithms (GAP, BESTFIT, FASTA, and TFASTA in the Wisconsin Genetics Software Package, Genetics Computer Group, 575 Science Dr., Madison, Wis.), or by manual alignment and visual inspection (see, e.g., Brent et al., (2003) Current Protocols in Molecular Biology).

[0982] Two examples of algorithms that are suitable for determining percent sequence identity and sequence similarity are the BLAST and BLAST 2.0 algorithms, which are described in Altschul et al., (1977) Nuc. Acids Res. 25:3389-3402; and Altschul et al., (1990) J. Mol. Biol. 215:403-410, respectively. Software for performing BLAST analyses is publicly available through the National Center for Biotechnology Information.

[0983] The percent identity between two amino acid sequences can also be determined using the algorithm of E. Meyers and W. Miller, (1988) Comput. Appl. Biosci. 4:11-17) which has been incorporated into the ALIGN program (version 2.0), using a PAM120 weight residue table, a gap length penalty of 12 and a gap penalty of 4. In addition, the percent identity between two amino acid sequences can be determined using the Needleman and Wunsch (1970) J. Mol. Biol. 48:444-453) algorithm which has been incorporated into the GAP program in the GCG software package (available at www.gcg.com), using either a Blossom 62 matrix or a PAM250 matrix, and a gap weight of 16, 14, 12, 10, 8, 6, or 4 and a length weight of 1, 2, 3, 4, 5, or 6.

[0984] Sequence information for exemplary REC deletions are provided for 83 naturally-occurring Cas9 orthologs in Table 8.

[0985] The amino acid sequences of exemplary Cas9 molecules from different bacterial species are shown below.

TABLE 8
Amino Acid Sequence of Cas9 Orthologs

| | | REC2 | | | REC1_{CT} | | | Rec_{sub} | | |
|---|---|---|---|---|---|---|---|---|---|---|
| | Amino | start | stop | # AA | start | stop | # AA | start | stop | # AA |
| | acid | (AA | (AA | deleted | (AA | (AA | deleted | (AA | (AA | deleted |
| Species/Composite ID | sequence | pos) | pos) | (n) | pos) | pos) | (n) | pos) | pos) | (n) |
| Staphylococcus Aureus | SEQ ID | 126 | 166 | 41 | 296 | 352 | 57 | 296 | 352 | 57 |
| tr\|J7RUA5\|J7RUA5_STAAU | NO: 304 | | | | | | | | | |
| Streptococcus Pyogenes | SEQ ID | 176 | 314 | 139 | 511 | 592 | 82 | 511 | 592 | 82 |
| sp\|Q99ZW2\|CAS9_STRP1 | NO: 305 | | | | | | | | | |
| Campylobacter jejuni NCTC 11168 | SEQ ID | 137 | 181 | 45 | 316 | 360 | 45 | 316 | 360 | 45 |
| gi\|218563121\|ref\|YP_002344900.1 | NO: 306 | | | | | | | | | |
| Bacteroides fragilis NCTC 9343 | SEQ ID | 148 | 339 | 192 | 524 | 617 | 84 | 524 | 617 | 84 |
| gi\|60683389\|ref\|YP_213533.1\| | NO: 307 | | | | | | | | | |
| Bifidobacterium bifidum S17 | SEQ ID | 173 | 335 | 163 | 516 | 607 | 87 | 516 | 607 | 87 |
| gi\|310286728\|ref\|YP_003937986. | NO: 308 | | | | | | | | | |
| Veillonella atypica ACS-134-V-Col7a | SEQ ID | 185 | 339 | 155 | 574 | 663 | 79 | 574 | 663 | 79 |
| gi\|303229466\|ref\|ZP_07316256.1 | NO: 309 | | | | | | | | | |
| Lactobacillus rhamnosus GG | SEQ ID | 169 | 320 | 152 | 559 | 645 | 78 | 559 | 645 | 78 |
| gi\|258509199\|ref\|YP_003171950.1 | NO: 310 | | | | | | | | | |
| Filifactor alocis ATCC 35896 | SEQ ID | 166 | 314 | 149 | 508 | 592 | 76 | 508 | 592 | 76 |
| gi\|374307738\|ref\|YP_005054169.1 | NO: 311 | | | | | | | | | |
| Oenococcus kitaharae DSM 17330 | SEQ ID | 169 | 317 | 149 | 555 | 639 | 80 | 555 | 639 | 80 |
| gi\|366983953\|gb\|EHN59352.1\| | NO: 312 | | | | | | | | | |
| Fructobacillus fructosus KCTC 3544 | SEQ ID | 168 | 314 | 147 | 488 | 571 | 76 | 488 | 571 | 76 |
| gi\|339625081\|ref\|ZP_08660870.1 | NO: 313 | | | | | | | | | |
| Catenibacterium mitsuokai DSM 15897 | SEQ ID | 173 | 318 | 146 | 511 | 594 | 78 | 511 | 594 | 78 |
| gi\|224543312\|ref\|ZP_03683851.1 | NO: 314 | | | | | | | | | |
| Finegoldia magna ATCC 29328 | SEQ ID | 168 | 313 | 146 | 452 | 534 | 77 | 452 | 534 | 77 |
| gi\|169823755\|ref\|YP_001691366.1 | NO: 315 | | | | | | | | | |
| CoriobacteriumglomeransPW2 | SEQ ID | 175 | 318 | 144 | 511 | 592 | 82 | 511 | 592 | 82 |
| gi\|328956315\|ref\|YP_004373648.1 | NO: 316 | | | | | | | | | |
| Eubacterium yurii ATCC 43715 | SEQ ID | 169 | 310 | 142 | 552 | 633 | 76 | 552 | 633 | 76 |
| gi\|306821691\|ref\|ZP_07455288.1 | NO: 317 | | | | | | | | | |
| Peptoniphilus duerdenii ATCC BAA-1640 | SEQ ID | 171 | 311 | 141 | 535 | 615 | 76 | 535 | 615 | 76 |
| gi\|304438954\|ref\|ZP_07398877.1 | NO: 318 | | | | | | | | | |
| Acidaminococcus sp. D21 | SEQ ID | 167 | 306 | 140 | 511 | 591 | 75 | 511 | 591 | 75 |
| gi\|227824983\|ref\|ZP_03989815.1 | NO: 319 | | | | | | | | | |
| Lactobacillus farciminis KCTC 3681 | SEQ ID | 171 | 310 | 140 | 542 | 621 | 85 | 542 | 621 | 85 |
| gi\|336394882\|ref\|ZP_08576281.1 | NO: 320 | | | | | | | | | |
| Streptococcus sanguinis SK49 | SEQ ID | 185 | 324 | 140 | 411 | 490 | 85 | 411 | 490 | 85 |
| gi\|422884106\|ref\|ZP_16930555.1 | NO: 321 | | | | | | | | | |
| Coprococcus catus GD-7 | SEQ ID | 172 | 310 | 139 | 556 | 634 | 76 | 556 | 634 | 76 |
| gi\|291520705\|emb\|CBK78998.1\| | NO: 322 | | | | | | | | | |
| Streptococcus mutans UA159 | SEQ ID | 176 | 314 | 139 | 392 | 470 | 84 | 392 | 470 | 84 |
| gi\|24379809\|ref\|NP_721764.1\| | NO: 323 | | | | | | | | | |
| Streptococcus pyogenes M1 GAS | SEQ ID | 176 | 314 | 139 | 523 | 600 | 82 | 523 | 600 | 82 |
| gi\|13622193\|gb\|AAK33936.1\| | NO: 324 | | | | | | | | | |
| Streptococcus thermophilus LMD-9 | SEQ ID | 176 | 314 | 139 | 481 | 558 | 81 | 481 | 558 | 81 |
| gi\|116628213\|ref\|YP_820832.1\| | NO: 325 | | | | | | | | | |
| Fusobacteriumnucleatum ATCC49256 | SEQ ID | 171 | 308 | 138 | 537 | 614 | 76 | 537 | 614 | 76 |
| gi\|34762592\|ref\|ZP_00143587.1\| | NO: 326 | | | | | | | | | |
| Planococcus antarcticus DSM 14505 | SEQ ID | 162 | 299 | 138 | 538 | 614 | 94 | 538 | 614 | 94 |
| gi\|389815359\|ref\|ZP_10206685.1 | NO: 327 | | | | | | | | | |
| Treponema denticola ATCC 35405 | SEQ ID | 169 | 305 | 137 | 524 | 600 | 81 | 524 | 600 | 81 |
| gi\|42525843\|ref\|NP_970941.1\| | NO: 328 | | | | | | | | | |
| Solobacterium moorei F0204 | SEQ ID | 179 | 314 | 136 | 544 | 619 | 77 | 544 | 619 | 77 |
| gi\|320528778\|ref\|ZP_08029929.1 | NO: 329 | | | | | | | | | |
| Staphylococcus pseudintermedius ED99 | SEQ ID | 164 | 299 | 136 | 531 | 606 | 92 | 531 | 606 | 92 |
| gi\|323463801\|gb\|ADX75954.1\| | NO: 330 | | | | | | | | | |
| Flavobacterium branchiophilum FL-15 | SEQ ID | 162 | 286 | 125 | 538 | 613 | 63 | 538 | 613 | 63 |
| gi\|347536497\|ref\|YP_004843922.1 | NO: 331 | | | | | | | | | |
| Ignavibacterium album JCM 16511 | SEQ ID | 223 | 329 | 107 | 357 | 432 | 90 | 357 | 432 | 90 |
| gi\|385811609\|ref\|YP_005848005.1 | NO: 332 | | | | | | | | | |
| Bergeyella zoohelcum ATCC 43767 | SEQ ID | 165 | 261 | 97 | 529 | 604 | 56 | 529 | 604 | 56 |
| gi\|423317190\|ref\|ZP_17295095.1 | NO: 333 | | | | | | | | | |
| Nitrobacter hamburgensis X14 | SEQ ID | 169 | 253 | 85 | 536 | 611 | 48 | 536 | 611 | 48 |
| gi\|92109262\|ref\|YP_571550.1\| | NO: 334 | | | | | | | | | |
| Odoribacter laneus YIT 12061 | SEQ ID | 164 | 242 | 79 | 535 | 610 | 63 | 535 | 610 | 63 |
| gi\|374384763\|ref\|ZP_09642280.1 | NO: 335 | | | | | | | | | |
| Legionella pneumophila str. Paris | SEQ ID | 164 | 239 | 76 | 402 | 476 | 67 | 402 | 476 | 67 |
| gi\|54296138\|ref\|YP_122507.1\| | NO: 336 | | | | | | | | | |
| Bacteroides sp. 20 3 | SEQ ID | 198 | 269 | 72 | 530 | 604 | 83 | 530 | 604 | 83 |
| gi\|301311869\|ref\|ZP_07217791.1 | NO: 337 | | | | | | | | | |
| Akkermansia muciniphila ATCC BAA-835 | SEQ ID | 136 | 202 | 67 | 348 | 418 | 62 | 348 | 418 | 62 |
| gi\|187736489\|ref\|YP_001878601 | NO: 338 | | | | | | | | | |
| Prevotella sp. C561 | SEQ ID | 184 | 250 | 67 | 357 | 425 | 78 | 357 | 425 | 78 |
| gi\|345885718\|ref\|ZP_08837074.1 | NO: 339 | | | | | | | | | |
| Wolinella succinogenes DSM 1740 | SEQ ID | 157 | 218 | 36 | 401 | 468 | 60 | 401 | 468 | 60 |
| gi\|34557932\|ref\|NP_907747.1\| | NO: 340 | | | | | | | | | |
| Alicyclobacillus hesperidum URH17-3-68 | SEQ ID | 142 | 196 | 55 | 416 | 482 | 61 | 416 | 482 | 61 |
| gi\|403744858\|ref\|ZP_10953934.1 | NO: 341 | | | | | | | | | |
| Caenispirillum salinarum AK4 | SEQ ID | 161 | 214 | 54 | 330 | 393 | 68 | 330 | 393 | 68 |
| gi\|427429481\|ref\|ZP_18919511.1 | NO: 342 | | | | | | | | | |
| Eubacterium rectale ATCC 33656 | SEQ ID | 133 | 185 | 53 | 322 | 384 | 60 | 322 | 384 | 60 |
| gi\|238924075\|ref\|YP_002937591.1 | NO: 343 | | | | | | | | | |
| Mycoplasma synoviae 53 | SEQ ID | 187 | 239 | 53 | 319 | 381 | 80 | 319 | 381 | 80 |
| gi\|71894592\|ref\|YP_278700.1\| | NO: 344 | | | | | | | | | |
| Porphyromonas sp. oral taxon 279 str. F0450 | SEQ ID | 150 | 202 | 53 | 309 | 371 | 60 | 309 | 371 | 60 |
| gi\|402847315\|ref\|ZP_10895610.1 | NO: 345 | | | | | | | | | |
| Streptococcus thermophilus LMD-9 | SEQ ID | 127 | 178 | 139 | 424 | 486 | 81 | 424 | 486 | 81 |
| gi\|116627542\|ref\|YP_820161.1\| | NO: 346 | | | | | | | | | |
| Roseburia inulinivorans DSM 16841 | SEQ ID | 154 | 204 | 51 | 318 | 380 | 69 | 318 | 380 | 69 |
| gi\|225377804\|ref\|ZP_03755025.1 | NO: 347 | | | | | | | | | |
| Methylosinus trichosporium OB3b | SEQ ID | 144 | 193 | 50 | 426 | 488 | 64 | 426 | 488 | 64 |
| gi\|296446027\|ref\|ZP_06887976.1 | NO: 348 | | | | | | | | | |
| Ruminococcus albus 8 | SEQ ID | 139 | 187 | 49 | 351 | 412 | 55 | 351 | 412 | 55 |
| gi\|325677756\|ref\|ZP_08157403.1 | NO: 349 | | | | | | | | | |
| Bifidobacterium longum DJO10A | SEQ ID | 183 | 230 | 48 | 370 | 431 | 44 | 370 | 431 | 44 |
| gi\|189440764\|ref\|YP_001955845 | NO: 350 | | | | | | | | | |
| Enterococcus faecalis TX0012 | SEQ ID | 123 | 170 | 48 | 327 | 387 | 60 | 327 | 387 | 60 |
| gi\|315149830\|gb\|EFT93846.1\| | NO: 351 | | | | | | | | | |
| Mycoplasma mobile 163K | SEQ ID | 179 | 226 | 48 | 314 | 374 | 79 | 314 | 374 | 79 |
| gi\|47458868\|ref\|YP_015730.1\| | NO: 352 | | | | | | | | | |
| Actinomyces coleocanis DSM 15436 | SEQ ID | 147 | 193 | 47 | 358 | 418 | 40 | 358 | 418 | 40 |
| gi\|227494853\|ref\|ZP_03925169.1 | NO: 353 | | | | | | | | | |
| Dinoroseobacter shibae DFL 12 | SEQ ID | 138 | 184 | 47 | 338 | 398 | 48 | 338 | 398 | 48 |
| gi\|159042956\|ref\|YP_001531750.1 | NO: 354 | | | | | | | | | |
| Actinomyces sp. oral taxon 180 str. F0310 | SEQ ID | 183 | 228 | 46 | 349 | 409 | 40 | 349 | 409 | 40 |
| gi\|315605738\|ref\|ZP_07880770.1 | NO: 355 | | | | | | | | | |
| Alcanivorax sp. W11-5 | SEQ ID | 139 | 183 | 45 | 344 | 404 | 61 | 344 | 404 | 61 |
| gi\|407803669\|ref\|ZP_11150502.1 | NO: 356 | | | | | | | | | |
| Aminomonas paucivorans DSM 12260 | SEQ ID | 134 | 178 | 45 | 341 | 401 | 63 | 341 | 401 | 63 |
| gi\|312879015\|ref\|ZP_07738815.1 | NO: 357 | | | | | | | | | |
| Mycoplasma canis PG 14 | SEQ ID | 139 | 183 | 45 | 319 | 379 | 76 | 319 | 379 | 76 |
| gi\|384393286\|gb\|EIE39736.1\| | NO: 358 | | | | | | | | | |
| Lactobacillus coryniformis KCTC 3535 | SEQ ID | 141 | 184 | 44 | 328 | 387 | 61 | 328 | 387 | 61 |
| gi\|336393381\|ref\|ZP_08574780.1 | NO: 359 | | | | | | | | | |
| Elusimicrobium minutum Pei191 | SEQ ID | 177 | 219 | 43 | 322 | 381 | 47 | 322 | 381 | 47 |
| gi\|187250660\|ref\|YP_001875142.1 | NO: 360 | | | | | | | | | |
| Neisseria meningitidis Z2491 | SEQ ID | 147 | 189 | 43 | 360 | 419 | 61 | 360 | 419 | 61 |
| gi\|218767588\|ref\|YP_002342100.1 | NO: 361 | | | | | | | | | |
| Pasteurella multocida str. Pm70 | SEQ ID | 139 | 181 | 43 | 319 | 378 | 61 | 319 | 378 | 61 |
| gi\|15602992\|ref\|NP_246064.1\| | NO: 362 | | | | | | | | | |
| Rhodovulum sp. PH10 | SEQ ID | 141 | 183 | 43 | 319 | 378 | 48 | 319 | 378 | 48 |
| gi\|402849997\|ref\|ZP_10898214.1 | NO: 363 | | | | | | | | | |
| Eubacterium dolichum DSM 3991 | SEQ ID | 131 | 172 | 42 | 303 | 361 | 59 | 303 | 361 | 59 |
| gi\|160915782\|ref\|ZP_02077990.1 | NO: 364 | | | | | | | | | |
| Nitratifractor salsuginis DSM 16511 | SEQ ID | 143 | 184 | 42 | 347 | 404 | 61 | 347 | 404 | 61 |
| gi\|319957206\|ref\|YP_004168469.1 | NO: 365 | | | | | | | | | |
| Rhodospirillum rubrum ATCC 11170 | SEQ ID | 139 | 180 | 42 | 314 | 371 | 55 | 314 | 371 | 55 |
| gi\|83591793\|ref\|YP_425545.1\| | NO: 366 | | | | | | | | | |
| Clostridium cellulolyticum H10 | SEQ ID | 137 | 176 | 40 | 320 | 376 | 61 | 320 | 376 | 61 |
| gi\|220930482\|ref\|YP_002507391.1 | NO: 367 | | | | | | | | | |
| Helicobacter mustelae 12198 | SEQ ID | 148 | 187 | 40 | 298 | 354 | 48 | 298 | 354 | 48 |
| gi\|291276265\|ref\|YP_003516037.1 | NO: 368 | | | | | | | | | |
| Ilyobacter polytropus DSM 2926 | SEQ ID | 134 | 173 | 40 | 462 | 517 | 63 | 462 | 517 | 63 |
| gi\|310780384\|ref\|YP_003968716.1 | NO: 369 | | | | | | | | | |
| Sphaerochaeta globus str. Buddy | SEQ ID | 163 | 202 | 40 | 335 | 389 | 45 | 335 | 389 | 45 |
| gi\|325972003\|ref\|YP_004248194.1 | NO: 370 | | | | | | | | | |
| Staphylococcus lugdunensis M23590 | SEQ ID | 128 | 167 | 40 | 337 | 391 | 57 | 337 | 391 | 57 |
| gi\|315659848\|ref\|ZP_07912707.1 | NO: 371 | | | | | | | | | |
| Treponema sp. JC4 | SEQ ID | 144 | 183 | 40 | 328 | 382 | 63 | 328 | 382 | 63 |
| gi\|384109266\|ref\|ZP_10010146.1 | NO: 372 | | | | | | | | | |
| uncultured delta proteobacterium | SEQ ID | 154 | 193 | 40 | 313 | 365 | 55 | 313 | 365 | 55 |
| HF0070 07E19 | NO: 373 | | | | | | | | | |
| gi\|297182908\|gb\|ADI19058.1\| | | | | | | | | | | |
| Alicycliphilus denitrificans K601 | SEQ ID | 140 | 178 | 39 | 317 | 366 | 48 | 317 | 366 | 48 |
| gi\|330822845\|ref\|YP_004386148.1 | NO: 374 | | | | | | | | | |
| Azospirillum sp. B510 | SEQ ID | 205 | 243 | 39 | 342 | 389 | 46 | 342 | 389 | 46 |
| gi\|288957741\|ref\|YP_003448082.1 | NO: 375 | | | | | | | | | |
| Bradyrhizobium sp. BTAi1 | SEQ ID | 143 | 181 | 39 | 323 | 370 | 48 | 323 | 370 | 48 |
| gi\|148255343\|ref\|YP_001239928.1 | NO: 376 | | | | | | | | | |
| Parvibaculum lavamentivorans DS-1 | SEQ ID | 138 | 176 | 39 | 327 | 374 | 58 | 327 | 374 | 58 |
| gi\|154250555\|ref\|YP_001411379.1 | NO: 377 | | | | | | | | | |
| Prevotella timonensis CRIS 5C-B1 | SEQ ID | 170 | 208 | 39 | 328 | 375 | 61 | 328 | 375 | 61 |
| gi\|282880052\|ref\|ZP_06288774.1 | NO: 378 | | | | | | | | | |
| Bacillus smithii 7 3 47FAA | SEQ ID | 134 | 171 | 38 | 401 | 448 | 63 | 401 | 448 | 63 |
| gi\|365156657\|ref\|ZP_09352959.1 | NO: 379 | | | | | | | | | |
| Cand. Puniceispirillum marinum IMCC1322 | SEQ ID | 135 | 172 | 38 | 344 | 391 | 53 | 344 | 391 | 53 |
| gi\|294086111\|ref\|YP_003552871.1 | NO: 380 | | | | | | | | | |
| Barnesiella intestinihominis YIT 11860 | SEQ ID | 140 | 176 | 37 | 371 | 417 | 60 | 371 | 417 | 60 |
| gi\|404487228\|ref\|ZP_11022414.1 | NO: 381 | | | | | | | | | |
| Ralstonia syzygii R24 | SEQ ID | 140 | 176 | 37 | 395 | 440 | 50 | 395 | 440 | 50 |
| gi\|344171927\|emb\|CCA84553.1\| | NO: 382 | | | | | | | | | |
| Wolinella succinogenes DSM 1740 | SEQ ID | 145 | 180 | 36 | 348 | 392 | 60 | 348 | 392 | 60 |
| gi\|34557790\|ref\|NP_907605.1\| | NO: 383 | | | | | | | | | |
| Mycoplasma gallisepticum str. F | SEQ ID | 144 | 177 | 34 | 373 | 416 | 71 | 373 | 416 | 71 |
| gi\|284931710\|gb\|ADC31648.1\| | NO: 384 | | | | | | | | | |
| Acidothermus cellulolyticus 11B | SEQ ID | 150 | 182 | 33 | 341 | 380 | 58 | 341 | 380 | 58 |
| gi\|117929158\|ref\|YP_873709.1\| | NO: 385 | | | | | | | | | |
| Mycoplasma ovipneumoniae SC01 | SEQ ID | 156 | 184 | 29 | 381 | 420 | 62 | 381 | 420 | 62 |
| gi\|363542550\|ref\|ZP_09312133.1 | NO: 386 | | | | | | | | | |

TABLE 9
Amino Acid Sequence of Cas9 Core Domains

| | Cas9 Start (AA pos) | Cas9 Stop (AA pos) |
|---|---|---|
| | Start and Stop numbers refer to the | |
| Strain Name | sequence in Table 7 | |
| Staphylococcus Aureus | 1 | 772 |
| Streptococcus Pyogenes | 1 | 1099 |
| Campulobacter Jejuni | 1 | 741 |

TABLE 10
Identified PAM sequences and
corresponding RKR motifs

| | | RKR |
|---|---|---|
| | PAM sequence | motif |
| Strain Name | (NA) | (AA) |
| Streptococcus pyogenes | NGG | RKR |
| Streptococcus mutans | NGG | RKR |
| Streptococcus | NGGNG | RYR |
| thermophilus A | | |
| Treponema denticola | NAAAAN | VAK |
| Streptococcus | NNAAAAW | IYK |
| thermophilus B | | |
| Campylobacter jejuni | NNNNACA | NLK |
| Pasteurella multocida | GNNNCNNA | KDG |
| Neisseria meningitidis | NNNNGATT or | IGK |
| Staphylococcus aureus | NNGRRV (R = A or G; | NDK |
| | V = A, G or C) | |
| | NNGRRT (R = A or G) | |

PI domains are provided in Tables 11 and 12.

TABLE 11
Altered PI Domains

| | PI Start | PI Stop (AA | | |
|---|---|---|---|---|
| | (AA pos) | pos) | | |
| | Start and Stop numbers | | | |
| | refer to the sequences in | | Length of PI | RKR |
| Strain Name | Table 100 | | (AA) | motif (AA) |
| Alicycliphilus | 837 | 1029 | 193 | --Y |
| denitrificans | | | | |
| K601 | | | | |
| Campylobacter | 741 | 984 | 244 | -NG |
| jejuni NCTC | | | | |
| 11168 | | | | |
| Helicobacter | 771 | 1024 | 254 | -NQ |
| mustelae 12198 | | | | |

TABLE 12
Other Altered PI Domains

| | PI Start | PI Stop (AA | | |
|---|---|---|---|---|
| | (AA pos) | pos) | | |
| | Start and Stop numbers | | | |
| | refer to the sequences in | | Length of PI | |
| Strain Name | Table 7 | | (AA) | RKR motif (AA) |
| Akkermansia muciniphila ATCC BAA-835 | 871 | 1101 | 231 | ALK |
| Ralstonia syzygii R24 | 821 | 1062 | 242 | APY |
| Cand. Puniceispirillum marinum IMCC1322 | 815 | 1035 | 221 | AYK |
| Fructobacillus fructosus KCTC 3544 | 1074 | 1323 | 250 | DGN |
| Eubacterium yurii ATCC 43715 | 1107 | 1391 | 285 | DGY |
| Eubacterium dolichum DSM 3991 | 779 | 1096 | 318 | DKK |
| Dinoroseobacter shibae DFL 12 | 851 | 1079 | 229 | DPI |
| Clostridium cellulolyticum H10 | 767 | 1021 | 255 | EGK |
| Pasteurella multocida str. Pm70 | 815 | 1056 | 242 | ENN |
| Mycoplasma canis PG 14 | 907 | 1233 | 327 | EPK |
| Porphyromonas sp. oral taxon 279 str. F0450 | 935 | 1197 | 263 | EPT |
| Filifactor alocis ATCC 35896 | 1094 | 1365 | 272 | EVD |
| Aminomonas paucivorans DSM 12260 | 801 | 1052 | 252 | EVY |
| Wolinella succinogenes DSM 1740 | 1034 | 1409 | 376 | EYK |
| Oenococcus kitaharae DSM 17330 | 1119 | 1389 | 271 | GAL |
| Coriobacterium glomerans PW2 | 1126 | 1384 | 259 | GDR |
| Peptoniphilus duerdenii ATCC BAA-1640 | 1091 | 1364 | 274 | GDS |
| Bifidobacterium bifidum S17 | 1138 | 1420 | 283 | GGL |
| Alicyclobacillus hesperidum URH17-3-68 | 876 | 1146 | 271 | GGR |
| Roseburia inulinivorans DSM 16841 | 895 | 1152 | 258 | GGT |
| Actinomyces coleocanis DSM 15436 | 843 | 1105 | 263 | GKK |
| Odoribacter laneus YIT 12061 | 1103 | 1498 | 396 | GKV |
| Coprococcus catus GD-7 | 1063 | 1338 | 276 | GNQ |
| Enterococcus faecalis TX0012 | 829 | 1150 | 322 | GRK |
| Bacillus smithii 7 3 47FAA | 809 | 1088 | 280 | GSK |
| Legionella pneumophila str. Paris | 1021 | 1372 | 352 | GTM |
| Bacteroides fragilis NCTC 9343 | 1140 | 1436 | 297 | IPV |
| Mycoplasma ovipneumoniae SC01 | 923 | 1265 | 343 | IRI |
| Actinomyces sp. oral taxon 180 str. F0310 | 895 | 1181 | 287 | KEK |
| Treponema sp. JC4 | 832 | 1062 | 231 | KIS |
| Fusobacteriumnucleatum ATCC49256 | 1073 | 1374 | 302 | KKV |
| Lactobacillus farciminis KCTC 3681 | 1101 | 1356 | 256 | KKV |
| Nitratifractor salsuginis DSM 16511 | 840 | 1132 | 293 | KMR |
| Lactobacillus coryniformis KCTC 3535 | 850 | 1119 | 270 | KNK |
| Mycoplasma mobile 163K | 916 | 1236 | 321 | KNY |
| Flavobacterium branchiophilum FL-15 | 1182 | 1473 | 292 | KQK |
| Prevotella timonensis CRIS 5C-B1 | 957 | 1218 | 262 | KQQ |
| Methylosinus trichosporium OB3b | 830 | 1082 | 253 | KRP |
| Prevotella sp. C561 | 1099 | 1424 | 326 | KRY |
| Mycoplasma gallisepticum str. F | 911 | 1269 | 359 | KTA |
| Lactobacillus rhamnosus GG | 1077 | 1363 | 287 | KYG |
| Wolinella succinogenes DSM 1740 | 811 | 1059 | 249 | LPN |
| Streptococcus thermophilus LMD-9 | 1099 | 1388 | 290 | MLA |
| Treponema denticola ATCC 35405 | 1092 | 1395 | 304 | NDS |
| Bergeyella zoohelcum ATCC 43767 | 1098 | 1415 | 318 | NEK |
| Veillonella atypica ACS-134-V-Col7a | 1107 | 1398 | 292 | NGF |
| Neisseria meningitidis Z2491 | 835 | 1082 | 248 | NHN |
| Ignavibacterium album JCM 16511 | 1296 | 1688 | 393 | NKK |
| Ruminococcus albus 8 | 853 | 1156 | 304 | NNF |
| Streptococcus thermophilus LMD-9 | 811 | 1121 | 311 | NNK |
| Barnesiella intestinihominis YIT 11860 | 871 | 1153 | 283 | NPV |
| Azospirillum sp. B510 | 911 | 1168 | 258 | PFH |
| Rhodospirillum rubrum ATCC 11170 | 863 | 1173 | 311 | PRG |
| Planococcus antarcticus DSM 14505 | 1087 | 1333 | 247 | PYY |
| Staphylococcus pseudintermedius ED99 | 1073 | 1334 | 262 | QIV |
| Alcanivorax sp. W11-5 | 843 | 1113 | 271 | RIE |
| Bradyrhizobium sp. BTAi1 | 811 | 1064 | 254 | RIY |
| Streptococcus pyogenes M1 GAS | 1099 | 1368 | 270 | RKR |
| Streptococcus mutans UA159 | 1078 | 1345 | 268 | RKR |
| Streptococcus Pyogenes | 1099 | 1368 | 270 | RKR |
| Bacteroides sp. 20 3 | 1147 | 1517 | 371 | RNI |
| S. aureus | 772 | 1053 | 282 | RNK |
| Solobacterium moorei F0204 | 1062 | 1327 | 266 | RSG |
| Finegoldia magna ATCC 29328 | 1081 | 1348 | 268 | RTE |
| uncultured delta proteobacterium HF0070 07E19 | 770 | 1011 | 242 | SGG |
| Acidaminococcus sp. D21 | 1064 | 1358 | 295 | SIG |
| Eubacterium rectale ATCC 33656 | 824 | 1114 | 291 | SKK |
| Caenispirillum salinarum AK4 | 1048 | 1442 | 395 | SLV |
| Acidothermus cellulolyticus 11B | 830 | 1138 | 309 | SPS |
| Catenibacterium mitsuokai DSM 15897 | 1068 | 1329 | 262 | SPT |
| Parvibaculum lavamentivorans DS-1 | 827 | 1037 | 211 | TGN |
| Staphylococcus lugdunensis M23590 | 772 | 1054 | 283 | TKK |
| Streptococcus sanguinis SK49 | 1123 | 1421 | 299 | TRM |
| Elusimicrobium minutum Pei191 | 910 | 1195 | 286 | TTG |
| Nitrobacter hamburgensis X14 | 914 | 1166 | 253 | VAY |
| Mycoplasma synoviae 53 | 991 | 1314 | 324 | VGF |
| Sphaerochaeta globus str. Buddy | 877 | 1179 | 303 | VKG |
| Ilyobacter polytropus DSM 2926 | 837 | 1092 | 256 | VNG |
| Rhodovulum sp. PH10 | 821 | 1059 | 239 | VPY |
| Bifidobacterium longum DJO10A | 904 | 1187 | 284 | VRK |

### Amino Acid Sequences Described in Table 8:

SEQ ID NO: 304
MKRNYILGLDIGITSVGYGIIDYETRDVIDAGVRLFKEANVENNEGRRSKRGARRLKRRRRHRI
QRVKKLLFDYNLLTDHSELSGINPYEARVKGLSQKLSEEEFSAALLHLAKRRGVHNVNEVEEDT
GNELSTKEQISRNSKALEEKYVAELQLERLKKDGEVRGSINRFKTSDYVKEAKQLLKVQKAYHQ
LDQSFIDTYIDLLETRRTYYEGPGEGSPFGWKDIKEWYEMLMGHCTYFPEELRSVKYAYNADLY
NALNDLNNLVITRDENEKLEYYEKFQIIENVFKQKKKPTLKQIAKEILVNEEDIKGYRVTSTGK
PEFTNLKVYHDIKDITARKEIIENAELLDQIAKILTIYQSSEDIQEELTNLNSELTQEEIEQIS
NLKGYTGTHNLSLKAINLILDELWHTNDNQIAIFNRLKLVPKKVDLSQQKEIPTTLVDDFILSP
VVKRSFIQSIKVINAIIKKYGLPNDIIIELAREKNSKDAQKMINEMQKRNRQTNERIEEIIRTT
GKENAKYLIEKIKLHDMQEGKCLYSLEAIPLEDLLNNPFNYEVDHIIPRSVSFDNSFNNKVLVK
QEENSKKGNRTPFQYLSSSDSKISYETFKKHILNLAKGKGRISKTKKEYLLEERDINRFSVQKD
FINRNLVDTRYATRGLMNLLRSYFRVNNLDVKVKSINGGFTSFLRRKWKFKKERNKGYKHHAED
ALIIANADFIFKEWKKLDKAKKVMENQMFEEKQAESMPEIETEQEYKEIFITPHQIKHIKDFKD
YKYSHRVDKKPNRELINDTLYSTRKDDKGNTLIVNNLNGLYDKDNDKLKKLINKSPEKLLMYHH
DPQTYQKLKLIMEQYGDEKNPLYKYYEETGNYLTKYSKKDNGPVIKKIKYYGNKLNAHLDITDD
YPNSRNKVVKLSLKPYRFDVYLDNGVYKFVTVKNLDVIKKENYYEVNSKCYEEAKKLKKISNQA
EFIASFYNNDLIKINGELYRVIGVNNDLLNRIEVNMIDITYREYLENMNDKRPPRIIKTIASKT
QSIKKYSTDILGNLYEVKSKKHPQIIKKG
SEQ ID NO: 305
[sequence omitted]
SEQ ID NO: 306
MARILAFDIGISSIGWAFSENDELKDCGVRIFTKVENPKTGESLALPRRLARSARKRLARRKAR
LNHLKHLIANEFKLNYEDYQSFDESLAKAYKGSLISPYELRFRALNELLSKQDFARVILHIAKR
RGYDDIKNSDDKEKGAILKAIKQNEEKLANYQSVGEYLYKEYFQKFKENSKEFTNVRNKKESYE
RCIAQSFLKDELKLIFKKQREFGFSFSKKFEEEVLSVAFYKRALKDFSHLVGNCSFFTDEKRAP
KNSPLAFMFVALTRIINLLNNLKNTEGILYTKDDLNALLNEVLKNGTLTYKQTKKLLGLSDDYE
FKGEKGTYFIEFKKYKEFIKALGEHNLSQDDLNEIAKDITLIKDEIKLKKALAKYDLNQNQIDS
LSKLEFKDHLNISFKALKLVTPLMLEGKKYDEACNELNLKVAINEDKKDFLPAFNETYYKDEVT
NPVVLRAIKEYRKVLNALLKKYGKVHKINIELAREVGKNHSQRAKIEKEQNENYKAKKDAELEC
EKLGLKINSKNILKLRLFKEQKEFCAYSGEKIKISDLQDEKMLEIDHIYPYSRSFDDSYMNKVL
VFTKQNQEKLNQTPFEAFGNDSAKWQKIEVLAKNLPTKKQKRILDKNYKDKEQKNFKDRNLNDT
RYIARLVLNYTKDYLDFLPLSDDENTKLNDTQKGSKVHVEAKSGMLTSALRHTWGFSAKDRNNH
LHHAIDAVIIAYANNSIVKAFSDFKKEQESNSAELYAKKISELDYKNKRKFFEPFSGFRQKVLD
KIDEIFVSKPERKKPSGALHEETFRKEEEFYQSYGGKEGVLKALELGKIRKVNGKIVKNGDMFR
VDIFKHKKTNKFYAVPIYTMDFALKVLPNKAVARSKKGEIKDWILMDENYEFCFSLYKDSLILI
QTKDMQEPEFVYYNAFTSSTVSLIVSKHDNKFETLSKNQKILFKNANEKEVIAKSIGIQNLKVF
EKYIVSALGEVTKAEFRQREDFKK
SEQ ID NO: 307
MKRILGLDLGTNSIGWALVNEAENKDERSSIVKLGVRVNPLTVDELTNFEKGKSITTNADRTLK
RGMRRNLQRYKLRRETLTEVLKEHKLITEDTILSENGNRTTFETYRLRAKAVTEEISLEEFARV
LLMINKKRGYKSSRKAKGVEEGTLIDGMDIARELYNNNLTPGELCLQLLDAGKKFLPDFYRSDL
QNELDRIWEKQKEYYPEILTDVLKEELRGKKRDAVWAICAKYFVWKENYTEWNKEKGKTEQQER
EHKLEGIYSKRKRDEAKRENLQWRVNGLKEKLSLEQLVIVFQEMNTQINNSSGYLGAISDRSKE
LYFNKQTVGQYQMEMLDKNPNASLRNMVFYRQDYLDEFNMLWEKQAVYHKELTEELKKEIRDII
IFYQRRLKSQKGLIGFCEFESRQIEVDIDGKKKIKTVGNRVISRSSPLFQEFKIWQILNNIEVT
VVGKKRKRRKLKENYSALFEELNDAEQLELNGSRRLCQEEKELLAQELFIRDKMTKSEVLKLLF
DNPQELDLNFKTIDGNKTGYALFQAYSKMIEMSGHEPVDFKKPVEKVVEYIKAVFDLLNWNTDI
LGFNSNEELDNQPYYKLWHLLYSFEGDNTPTGNGRLIQKMTELYGFEKEYATILANVSFQDDYG
SLSAKAIHKILPHLKEGNRYDVACVYAGYRHSESSLTREEIANKVLKDRLMLLPKNSLHNPVVE
KILNQMVNVINVIIDIYGKPDEIRVELARELKKNAKEREELTKSIAQTTKAHEEYKTLLQTEFG
LTNVSRTDILRYKLYKELESCGYKTLYSNTYISREKLFSKEFDIEHIIPQARLFDDSFSNKTLE
ARSVNIEKGNKTAYDFVKEKFGESGADNSLEHYLNNIEDLFKSGKISKTKYNKLKMAEQDIPDG
FIERDLRNTQYIAKKALSMLNEISHRVVATSGSVTDKLREDWQLIDVMKELNWEKYKALGLVEY
FEDRDGRQIGRIKDWTKRNDHRHHAMDALTVAFTKDVFIQYFNNKNASLDPNANEHAIKNKYFQ
NGRAIAPMPLREFRAEAKKHLENTLISIKAKNKVITGNINKTRKKGGVNKNMQQTPRGQLHLET
IYGSGKQYLTKEEKVNASFDMRKIGTVSKSAYRDALLKRLYENDNDPKKAFAGKNSLDKQPIWL
DKEQMRKVPEKVKIVTLEAIYTIRKEISPDLKVDKVIDVGVRKILIDRLNEYGNDAKKAFSNLD
KNPIWLNKEKGISIKRVTISGISNAQSLHVKKDKDGKPILDENGRNIPVDFVNTGNNHHVAVYY
RPVIDKRGQLVVDEAGNPKYELEEVVVSFFEAVTRANLGLPIIDKDYKTTEGWQFLFSMKQNEY
FVFPNEKTGFNPKEIDLLDVENYGLISPNLFRVQKFSLKNYVFRHHLETTIKDTSSILRGITWI
DFRSSKGLDTIVKVRVNHIGQIVSVGEY
SEQ ID NO: 308
MSRKNYVDDYAISLDIGNASVGWSAFTPNYRLVRAKGHELIGVRLFDPADTAESRRMARTTRRR
YSRRRWRLRLLDALFDQALSEIDPSFLARRKYSWVHPDDENNADCWYGSVLFDSNEQDKRFYEK
YPTIYHLRKALMEDDSQHDIREIYLAIHHMVKYRGNFLVEGTLESSNAFKEDELLKLLGRITRY
EMSEGEQNSDIEQDDENKLVAPANGQLADALCATRGSRSMRVDNALEALSAVNDLSREQRAIVK
AIFAGLEGNKLDLAKIFVSKEFSSENKKILGIYFNKSDYEEKCVQIVDSGLLDDEEREFLDRMQ
GQYNAIALKQLLGRSTSVSDSKCASYDAHRANWNLIKLQLRTKENEKDINENYGILVGWKIDSG
QRKSVRGESAYENMRKKANVFFKKMIETSDLSETDKNRLIHDIEEDKLFPIQRDSDNGVIPHQL
HQNELKQIIKKQGKYYPFLLDAFEKDGKQINKIEGLLTFRVPYFVGPLVVPEDLQKSDNSENHW
MVRKKKGEITPWNFDEMVDKDASGRKFIERLVGTDSYLLGEPTLPKNSLLYQEYEVLNELNNVR
LSVRTGNHWNDKRRMRLGREEKTLLCQRLFMKGQTVTKRTAENLLRKEYGRTYELSGLSDESKF
TSSLSTYGKMCRIFGEKYVNEHRDLMEKIVELQTVFEDKETLLHQLRQLEGISEADCALLVNTH
YTGWGRLSRKLLTTKAGECKISDDFAPRKHSIIEIMRAEDRNLMEIITDKQLGFSDWIEQENLG
AENGSSLMEVVDDLRVSPKVKRGIIQSIRLIDDISKAVGKRPSRIFLELADDIQPSGRTISRKS
RLQDLYRNANLGKEFKGIADELNACSDKDLQDDRLFLYYTQLGKDMYTGEELDLDRLSSAYDID
HIIPQAVTQNDSIDNRVLVARAENARKTDSFTYMPQIADRMRNFWQILLDNGLISRVKFERLTR
QNEFSEREKERFVQRSLVETRQIMKNVATLMRQRYGNSAAVIGLNAELTKEMHRYLGFSHKNRD
INDYHHAQDALCVGIAGQFAANRGFFADGEVSDGAQNSYNQYLRDYLRGYREKLSAEDRKQGRA
FGFIVGSMRSQDEQKRVNPRTGEVVWSEEDKDYLRKVMNYRKMLVTQKVGDDFGALYDETRYAA
TDPKGIKGIPFDGAKQDTSLYGGFSSAKPAYAVLIESKGKTRLVNVTMQEYSLLGDRPSDDELR
KVLAKKKSEYAKANILLRHVPKMQLIRYGGGLMVIKSAGELNNAQQLWLPYEEYCYFDDLSQGK
GSLEKDDLKKLLDSILGSVQCLYPWHRFTEEELADLHVAFDKLPEDEKKNVITGIVSALHADAK
TANLSIVGMTGSWRRMNNKSGYTFSDEDEFIFQSPSGLFEKRVTVGELKRKAKKEVNSKYRTNE
KRLPTLSGASQP
SEQ ID NO: 309
METQTSNQLITSHLKDYPKQDYFVGLDIGTNSVGWAVTNTSYELLKFHSHKMWGSRLFEEGESA
VTRRGFRSMRRRLERRKLRLKLLEELFADAMAQVDSTFFIRLHESKYHYEDKTTGHSSKHILFI
DEDYTDQDYFTEYPTIYHLRKDLMENGTDDIRKLFLAVHHILKYRGNFLYEGATFNSNAFTFED
VLKQALVNITFNCFDTNSAISSISNILMESGKTKSDKAKAIERLVDTYTVFDEVNTPDKPQKEQ
VKEDKKTLKAFANLVLGLSANLIDLFGSVEDIDDDLKKLQIVGDTYDEKRDELAKVWGDEIHII
DDCKSVYDAIILMSIKEPGLTISQSKVKAFDKHKEDLVILKSLLKLDRNVYNEMFKSDKKGLHN
YVHYIKQGRTEETSCSREDFYKYTKKIVEGLADSKDKEYILNEIELQTLLPLQRIKDNGVIPYQ
LHLEELKVILDKCGPKFPFLHTVSDGFSVTEKLIKMLEFRIPYYVGPLNTHHNIDNGGFSWAVR
KQAGRVTPWNFEEKIDREKSAAAFIKNLTNKCTYLFGEDVLPKSSLLYSEFMLLNELNNVRIDG
KALAQGVKQHLIDSIFKQDHKKMTKNRIELFLKDNNYITKKHKPEITGLDGEIKNDLTSYRDMV
RILGNNFDVSMAEDIITDITIFGESKKMLRQTLRNKFGSQLNDETIKKLSKLRYRDWGRLSKKL
LKGIDGCDKAGNGAPKTIIELMRNDSYNLMEILGDKFSFMECIEEENAKLAQGQVVNPHDIIDE
LALSPAVKRAVWQALRIVDEVAHIKKALPSRIFVEVARTNKSEKKKKDSRQKRLSDLYSAIKKD
DVLQSGLQDKEFGALKSGLANYDDAALRSKKLYLYYTQMGRCAYTGNIIDLNQLNTDNYDIDHI
YPRSLTKDDSFDNLVLCERTANAKKSDIYPIDNRIQTKQKPFWAFLKHQGLISERKYERLTRIA
PLTADDLSGFIARQLVETNQSVKATTTLLRRLYPDIDVVFVKAENVSDFRHNNNFIKVRSLNHH
HHAKDAYLNIVVGNVYHEKFTRNFRLFFKKNGANRTYNLAKMFNYDVICTNAQDGKAWDVKTSM
NTVKKMMASNDVRVTRRLLEQSGALADATIYKASVAAKAKDGAYIGMKTKYSVFADVTKYGGMT
KIKNAYSIIVQYTGKKGEEIKEIVPLPIYLINRNATDIELIDYVKSVIPKAKDISIKYRKLCIN
QLVKVNGFYYYLGGKTNDKIYIDNAIELVVPHDIATYIKLLDKYDLLRKENKTLKASSITTSIY
NINTSTVVSLNKVGIDVFDYFMSKLRTPLYMKMKGNKVDELSSTGRSKFIKMTLEEQSIYLLEV
LNLLTNSKTTFDVKPLGITGSRSTIGVKIHNLDEFKIINESITGLYSNEVTIV
SEQ ID NO: 310
MTKLNQPYGIGLDIGSNSIGFAVVDANSHLLRLKGETAIGARLFREGQSAADRRGSRTTRRRLS
RTRWRLSFLRDFFAPHITKIDPDFFLRQKYSEISPKDKDRFKYEKRLFNDRTDAEFYEDYPSMY
HLRLHLMTHTHKADPREIFLAIHHILKSRGHFLTPGAAKDFNTDKVDLEDIFPALTEAYAQVYP
DLELTFDLAKADDFKAKLLDEQATPSDTQKALVNLLLSSDGEKEIVKKRKQVLTEFAKAITGLK
TKFNLALGTEVDEADASNWQFSMGQLDDKWSNIETSMTDQGTEIFEQIQELYRARLLNGIVPAG
MSLSQAKVADYGQHKEDLELFKTYLKKLNDHELAKTIRGLYDRYINGDDAKPFLREDFVKALTK
EVTAHPNEVSEQLLNRMGQANFMLKQRTKANGAIPIQLQQRELDQIIANQSKYYDWLAAPNPVE
AHRWKMPYQLDELLNFHIPYYVGPLITPKQQAESGENVFAWMVRKDPSGNITPYNFDEKVDREA
SANTFIQRMKTTDTYLIGEDVLPKQSLLYQKYEVLNELNNVRINNECLGTDQKQRLIREVFERH
SSVTIKQVADNLVAHGDFARRPEIRGLADEKRFLSSLSTYHQLKEILHEAIDDPTKLLDIENII
TWSTVFEDHTIFETKLAEIEWLDPKKINELSGIRYRGWGQFSRKLLDGLKLGNGHTVIQELMLS
NHNLMQILADETLKETMTELNQDKLKTDDIEDVINDAYTSPSNKKALRQVLRVVEDIKHAANGQ
DPSWLFIETADGTGTAGKRTQSRQKQIQTVYANAAQELIDSAVRGELEDKIADKASFTDRLVLY
FMQGGRDIYTGAPLNIDQLSHYDIDHILPQSLIKDDSLDNRVLVNATINREKNNVFASTLFAGK
MKATWRKWHEAGLISGRKLRNLMLRPDEIDKFAKGFVARQLVETRQIIKLTEQIAAAQYPNTKI
IAVKAGLSHQLREELDFPKNRDVNHYHHAFDAFLAARIGTYLLKRYPKLAPFFTYGEFAKVDVK
KFREFNFIGALTHAKKNIIAKDTGEIVWDKERDIRELDRIYNFKRMLITHEVYFETADLFKQTI
YAAKDSKERGGSKQLIPKKQGYPTQVYGGYTQESGSYNALVRVAEADTTAYQVIKISAQNASKI
ASANLKSREKGKQLLNEIVVKQLAKRRKNWKPSANSFKIVIPRFGMGTLFQNAKYGLFMVNSDT
YYRNYQELWLSRENQKLLKKLFSIKYEKTQMNHDALQVYKAIIDQVEKFFKLYDINQFRAKLSD
AIERFEKLPINTDGNKIGKTETLRQILIGLQANGTRSNVKNLGIKTDLGLLQVGSGIKLDKDTQ
IVYQSPSGLFKRRIPLADL
SEQ ID NO: 311
MTKEYYLGLDVGTNSVGWAVTDSQYNLCKFKKKDMWGIRLFESANTAKDRRLQRGNRRRLERKK
QRIDLLQEIFSPEICKIDPTFFIRLNESRLHLEDKSNDFKYPLFIEKDYSDIEYYKEFPTIFHL
RKHLIESEEKQDIRLIYLALHNIIKTRGHFLIDGDLQSAKQLRPILDTFLLSLQEEQNLSVSLS
ENQKDEYEEILKNRSIAKSEKVKKLKNLFEISDELEKEEKKAQSAVIENFCKFIVGNKGDVCKF
LRVSKEELEIDSFSFSEGKYEDDIVKNLEEKVPEKVYLFEQMKAMYDWNILVDILETEEYISFA
KVKQYEKHKTNLRLLRDIILKYCTKDEYNRMFNDEKEAGSYTAYVGKLKKNNKKYWIEKKRNPE
EFYKSLGKLLDKIEPLKEDLEVLTMMIEECKNHTLLPIQKNKDNGVIPHQVHEVELKKILENAK
KYYSFLTETDKDGYSVVQKIESIFRFRIPYYVGPLSTRHQEKGSNVWMVRKPGREDRIYPWNME
EIIDFEKSNENFITRMTNKCTYLIGEDVLPKHSLLYSKYMVLNELNNVKVRGKKLPTSLKQKVF
EDLFENKSKVTGKNLLEYLQIQDKDIQIDDLSGFDKDFKTSLKSYLDFKKQIFGEEIEKESIQN
MIEDIIKWITIYGNDKEMLKRVIRANYSNQLTEEQMKKITGFQYSGWGNFSKMFLKGISGSDVS
TGETFDIITAMWETDNNLMQILSKKFTFMDNVEDFNSGKVGKIDKITYDSTVKEMFLSPENKRA
VWQTIQVAEEIKKVMGCEPKKIFIEMARGGEKVKKRTKSRKAQLLELYAACEEDCRELIKEIED
RDERDFNSMKLFLYYTQFGKCMYSGDDIDINELIRGNSKWDRDHIYPQSKIKDDSIDNLVLVNK
TYNAKKSNELLSEDIQKKMHSFWLSLLNKKLITKSKYDRLTRKGDFTDEELSGFIARQLVETRQ
STKAIADIFKQIYSSEVVYVKSSLVSDFRKKPLNYLKSRRVNDYHHAKDAYLNIVVGNVYNKKF
TSNPIQWMKKNRDTNYSLNKVFEHDVVINGEVIWEKCTYHEDTNTYDGGTLDRIRKIVERDNIL
YTEYAYCEKGELFNATIQNKNGNSTVSLKKGLDVKKYGGYFSANTSYFSLIEFEDKKGDRARHI
IGVPIYIANMLEHSPSAFLEYCEQKGYQNVRILVEKIKKNSLLIINGYPLRIRGENEVDTSFKR
AIQLKLDQKNYELVRNIEKFLEKYVEKKGNYPIDENRDHITHEKMNQLYEVLLSKMKKFNKKGM
ADPSDRIEKSKPKFIKLEDLIDKINVINKMLNLLRCDNDTKADLSLIELPKNAGSFVVKKNTIG
KSKIILVNQSVTGLYENRREL
SEQ ID NO: 312
MARDYSVGLDIGTSSVGWAAIDNKYHLIRAKSKNLIGVRLFDSAVTAEKRRGYRTTRRRLSRRH
WRLRLLNDIFAGPLTDFGDENFLARLKYSWVHPQDQSNQAHFAAGLLFDSKEQDKDFYRKYPTI
YHLRLALMNDDQKHDLREVYLAIHHLVKYRGHFLIEGDVKADSAFDVHTFADAIQRYAESNNSD
ENLLGKIDEKKLSAALTDKHGSKSQRAETAETAFDILDLQSKKQIQAILKSVVGNQANLMAIFG
LDSSAISKDEQKNYKFSFDDADIDEKIADSEALLSDTEFEFLCDLKAAFDGLTLKMLLGDDKTV
SAAMVRRFNEHQKDWEYIKSHIRNAKNAGNGLYEKSKKFDGINAAYLALQSDNEDDRKKAKKIF
QDEISSADIPDDVKADFLKKIDDDQFLPIQRTKNNGTIPHQLHRNELEQIIEKQGIYYPFLKDT
YQENSHELNKITALINFRVPYYVGPLVEEEQKIADDGKNIPDPTNHWMVRKSNDTITPWNLSQV
VDLDKSGRRFIERLTGTDTYLIGEPTLPKNSLLYQKFDVLQELNNIRVSGRRLDIRAKQDAFEH
LFKVQKTVSATNLKDFLVQAGYISEDTQIEGLADVNGKNFNNALTTYNYLVSVLGREFVENPSN
EELLEEITELQTVFEDKKVLRRQLDQLDGLSDHNREKLSRKHYTGWGRISKKLLTTKIVQNADK
IDNQTFDVPRMNQSIIDTLYNTKMNLMEIINNAEDDFGVRAWIDKQNTTDGDEQDVYSLIDELA
GPKEIKRGIVQSFRILDDITKAVGYAPKRVYLEFARKTQESHLTNSRKNQLSTLLKNAGLSELV
TQVSQYDAAALQNDRLYLYFLQQGKDMYSGEKLNLDNLSNYDIDHIIPQAYTKDNSLDNRVLVS
NITNRRKSDSSNYLPALIDKMRPFWSVLSKQGLLSKHKFANLTRTRDFDDMEKERFIARSLVET
RQIIKNVASLIDSHFGGETKAVAIRSSLTADMRRYVDIPKNRDINDYHHAFDALLFSTVGQYTE
NSGLMKKGQLSDSAGNQYNRYIKEWIHAARLNAQSQRVNPFGFVVGSMRNAAPGKLNPETGEIT
PEENADWSIADLDYLHKVMNFRKITVTRRLKDQKGQLYDESRYPSVLHDAKSKASINFDKHKPV
DLYGGFSSAKPAYAALIKFKNKFRLVNVLRQWTYSDKNSEDYILEQIRGKYPKAEMVLSHIPYG
QLVKKDGALVTISSATELHNFEQLWLPLADYKLINTLLKTKEDNLVDILHNRLDLPEMTIESAF
YKAFDSILSFAFNRYALHQNALVKLQAHRDDFNALNYEDKQQTLERILDALHASPASSDLKKIN
LSSGFGRLFSPSHFTLADTDEFIFQSVTGLFSTQKTVAQLYQETK
SEQ ID NO: 313
MVYDVGLDIGTGSVGWVALDENGKLARAKGKNLVGVRLFDTAQTAADRRGFRTTRRRLSRRKWR
LRLLDELFSAEINEIDSSFFQRLKYSYVHPKDEENKAHYYGGYLFPTEEETKKFHRSYPTIYHL
RQELMAQPNKRFDIREIYLAIHHLVKYRGHFLSSQEKITIGSTYNPEDLANAIEVYADEKGLSW
ELNNPEQLTEIISGEAGYGLNKSMKADEALKLFEFDNNQDKVAIKTLLAGLTGNQIDFAKLFGK
DISDKDEAKLWKLKLDDEALEEKSQTILSQLTDEEIELFHAVVQAYDGFVLIGLLNGADSVSAA
MVQLYDQHREDRKLLKSLAQKAGLKHKRFSEIYEQLALATDEATIKNGISTARELVEESNLSKE
VKEDTLRRLDENEFLPKQRTKANSVIPHQLHLAELQKILQNQGQYYPFLLDTFEKEDGQDNKIE
ELLRFRIPYYVGPLVTKKDVEHAGGDADNHWVERNEGFEKSRVTPWNFDKVFNRDKAARDFIER
LTGNDTYLIGEKTLPQNSLRYQLFTVLNELNNVRVNGKKFDSKTKADLINDLFKARKTVSLSAL
KDYLKAQGKGDVTITGLADESKFNSSLSSYNDLKKTFDAEYLENEDNQETLEKIIEIQTVFEDS
KIASRELSKLPLDDDQVKKLSQTHYTGWGRLSEKLLDSKIIDERGQKVSILDKLKSTSQNFMSI
INNDKYGVQAWITEQNTGSSKLTFDEKVNELTTSPANKRGIKQSFAVLNDIKKAMKEEPRRVYL
EFAREDQTSVRSVPRYNQLKEKYQSKSLSEEAKVLKKTLDGNKNKMSDDRYFLYFQQQGKDMYT
GRPINFERLSQDYDIDHIIPQAFTKDDSLDNRVLVSRPENARKSDSFAYTDEVQKQDGSLWTSL
LKSGFINRKKYERLTKAGKYLDGQKTGFIARQLVETRQIIKNVASLIEGEYENSKAVAIRSEIT
ADMRLLVGIKKHREINSFHHAFDALLITAAGQYMQNRYPDRDSTNVYNEFDRYTNDYLKNLRQL
SSRDEVRRLKSFGFVVGTMRKGNEDWSEENTSYLRKVMMFKNILTTKKTEKDRGPLNKETIFSP
KSGKKLIPLNSKRSDTALYGGYSNVYSAYMTLVRANGKNLLIKIPISIANQIEVGNLKINDYIV
NNPAIKKFEKILISKLPLGQLVNEDGNLIYLASNEYRHNAKQLWLSTTDADKIASISENSSDEE
LLEAYDILTSENVKNRFPFFKKDIDKLSQVRDEFLDSDKRIAVIQTILRGLQIDAAYQAPVKII
SKKVSDWHKLQQSGGIKLSDNSEMIYQSATGIFETRVKISDLL
SEQ ID NO: 314
IVDYCIGLDLGTGSVGWAVVDMNHRLMKRNGKHLWGSRLFSNAETAANRRASRSIRRRYNKRRE
RIRLLRAILQDMVLEKDPTFFIRLEHTSFLDEEDKAKYLGTDYKDNYNLFIDEDFNDYTYYHKY
PTIYHLRKALCESTEKADPRLIYLALHHIVKYRGNFLYEGQKFNMDASNIEDKLSDIFTQFTSF
NNIPYEDDEKKNLEILEILKKPLSKKAKVDEVMTLIAPEKDYKSAFKELVTGIAGNKMNVTKMI
LCEPIKQGDSEIKLKFSDSNYDDQFSEVEKDLGEYVEFVDALHNVYSWVELQTIMGATHTDNAS
ISEAMVSRYNKHHDDLKLLKDCIKNNVPNKYFDMFRNDSEKSKGYYNYINRPSKAPVDEFYKYV
KKCIEKVDTPEAKQILNDIELENFLLKQNSRTNGSVPYQMQLDEMIKIIDNQAEYYPILKEKRE
QLLSILTFRIPYYFGPLNETSEHAWIKRLEGKENQRILPWNYQDIVDVDATAEGFIKRMRSYCT
YFPDEEVLPKNSLIVSKYEVYNELNKIRVDDKLLEVDVKNDIYNELFMKNKTVTEKKLKNWLVN
NQCCSKDAEIKGFQKENQFSTSLTPWIDFTNIFGKIDQSNFDLIENIIYDLTVFEDKKIMKRRL
KKKYALPDDKVKQILKLKYKDWSRLSKKLLDGIVADNRFGSSVTVLDVLEMSRLNLMEIINDKD
LGYAQMIEEATSCPEDGKFTYEEVERLAGSPALKRGIWQSLQIVEEITKVMKCRPKYIYIEFER
SEEAKERTESKIKKLENVYKDLDEQTKKEYKSVLEELKGFDNTKKISSDSLFLYFTQLGKCMYS
GKKLDIDSLDKYQIDHIVPQSLVKDDSFDNRVLVVPSENQRKLDDLVVPFDIRDKMYRFWKLLF
DHELISPKKFYSLIKTEYTERDEERFINRQLVETRQITKNVTQIIEDHYSTTKVAAIRANLSHE
FRVKNHIYKNRDINDYHHAHDAYIVALIGGFMRDRYPNMHDSKAVYSEYMKMFRKNKNDQKRWK
DGFVINSMNYPYEVDGKLIWNPDLINEIKKCFYYKDCYCTTKLDQKSGQLFNLTVLSNDAHADK
GVTKAVVPVNKNRSDVHKYGGFSGLQYTIVAIEGQKKKGKKTELVKKISGVPLHLKAASINEKI
NYIEEKEGLSDVRIIKDNIPVNQMIEMDGGEYLLTSPTEYVNARQLVLNEKQCALIADIYNAIY
KQDYDNLDDILMIQLYIELTNKMKVLYPAYRGIAEKFESMNENYVVISKEEKANIIKQMLIVMH
RGPQNGNIVYDDFKISDRIGRLKTKNHNLNNIVFISQSPTGIYTKKYKL
SEQ ID NO: 315
MKSEKKYYIGLDVGTNSVGWAVTDEFYNILRAKGKDLWGVRLFEKADTAANTRIFRSGRRRNDR
KGMRLQILREIFEDEIKKVDKDFYDRLDESKFWAEDKKVSGKYSLFNDKNFSDKQYFEKFPTIF
HLRKYLMEEHGKVDIRYYFLAINQMMKRRGHFLIDGQISHVTDDKPLKEQLILLINDLLKIELE
EELMDSIFEILADVNEKRTDKKNNLKELIKGQDFNKQEGNILNSIFESIVTGKAKIKNIISDED
ILEKIKEDNKEDFVLTGDSYEENLQYFEEVLQENITLFNTLKSTYDFLILQSILKGKSTLSDAQ
VERYDEHKKDLEILKKVIKKYDEDGKLFKQVFKEDNGNGYVSYIGYYLNKNKKITAKKKISNIE
FTKYVKGILEKQCDCEDEDVKYLLGKIEQENFLLKQISSINSVIPHQIHLFELDKILENLAKNY
PSFNNKKEEFTKIEKIRKTFTFRIPYYVGPLNDYHKNNGGNAWIFRNKGEKIRPWNFEKIVDLH
KSEEEFIKRMLNQCTYLPEETVLPKSSILYSEYMVLNELNNLRINGKPLDTDVKLKLIEELFKK
KTKVTLKSIRDYMVRNNFADKEDFDNSEKNLEIASNMKSYIDFNNILEDKFDVEMVEDLIEKIT
IHTGNKKLLKKYIEETYPDLSSSQIQKIINLKYKDWGRLSRKLLDGIKGTKKETEKTDTVINFL
RNSSDNLMQIIGSQNYSFNEYIDKLRKKYIPQEISYEVVENLYVSPSVKKMIWQVIRVTEEITK
VMGYDPDKIFIEMAKSEEEKKTTISRKNKLLDLYKAIKKDERDSQYEKLLTGLNKLDDSDLRSR
KLYLYYTQMGRDMYTGEKIDLDKLFDSTHYDKDHIIPQSMKKDDSIINNLVLVNKNANQTTKGN
IYPVPSSIRNNPKIYNYWKYLMEKEFISKEKYNRLIRNTPLTNEELGGFINRQLVETRQSTKAI
KELFEKFYQKSKIIPVKASLASDLRKDMNTLKSREVNDLHHAHDAFLNIVAGDVWNREFTSNPI
NYVKENREGDKVKYSLSKDFTRPRKSKGKVIWTPEKGRKLIVDTLNKPSVLISNESHVKKGELF
NATIAGKKDYKKGKIYLPLKKDDRLQDVSKYGGYKAINGAFFFLVEHTKSKKRIRSIELFPLHL
LSKFYEDKNTVLDYAINVLQLQDPKIIIDKINYRTEIIIDNFSYLISTKSNDGSITVKPNEQMY
WRVDEISNLKKIENKYKKDAILTEEDRKIMESYIDKIYQQFKAGKYKNRRTTDTIIEKYEIIDL
DTLDNKQLYQLLVAFISLSYKTSNNAVDFTVIGLGTECGKPRITNLPDNTYLVYKSITGIYEKR
IRIK
SEQ ID NO: 316
MKLRGIEDDYSIGLDMGTSSVGWAVTDERGTLAHFKRKPTWGSRLFREAQTAAVARMPRGQRRR
YVRRRWRLDLLQKLFEQQMEQADPDFFIRLRQSRLLRDDRAEEHADYRWPLFNDCKFTERDYYQ
RFPTIYHVRSWLMETDEQADIRLIYLALHNIVKHRGNFLREGQSLSAKSARPDEALNHLRETLR
VWSSERGFECSIADNGSILAMLTHPDLSPSDRRKKIAPLFDVKSDDAAADKKLGIALAGAVIGL
KTEFKNIFGDFPCEDSSIYLSNDEAVDAVRSACPDDCAELFDRLCEVYSAYVLQGLLSYAPGQT
ISANMVEKYRRYGEDLALLKKLVKIYAPDQYRMFFSGATYPGTGIYDAAQARGYTKYNLGPKKS
EYKPSESMQYDDFRKAVEKLFAKTDARADERYRMMMDRFDKQQFLRRLKTSDNGSIYHQLHLEE
LKAIVENQGRFYPFLKRDADKLVSLVSFRIPYYVGPLSTRNARTDQHGENRFAWSERKPGMQDE
PIFPWNWESIIDRSKSAEKFILRMTGMCTYLQQEPVLPKSSLLYEEFCVLNELNGAHWSIDGDD
EHRFDAADREGIIEELFRRKRTVSYGDVAGWMERERNQIGAHVCGGQGEKGFESKLGSYIFFCK
DVFKVERLEQSDYPMIERIILWNTLFEDRKILSQRLKEEYGSRLSAEQIKTICKKRFTGWGRLS
EKFLTGITVQVDEDSVSIMDVLREGCPVSGKRGRAMVMMEILRDEELGFQKKVDDFNRAFFAEN
AQALGVNELPGSPAVRRSLNQSIRIVDEIASIAGKAPANIFIEVTRDEDPKKKGRRTKRRYNDL
KDALEAFKKEDPELWRELCETAPNDMDERLSLYFMQRGKCLYSGRAIDIHQLSNAGIYEVDHII
PRTYVKDDSLENKALVYREENQRKTDMLLIDPEIRRRMSGYWRMLHEAKLIGDKKFRNLLRSRI
DDKALKGFIARQLVETGQMVKLVRSLLEARYPETNIISVKASISHDLRTAAELVKCREANDFHH
AHDAFLACRVGLFIQKRHPCVYENPIGLSQVVRNYVRQQADIFKRCRTIPGSSGFIVNSFMTSG
FDKETGEIFKDDWDAEAEVEGIRRSLNFRQCFISRMPFEDHGVFWDATIYSPRAKKTAALPLKQ
GLNPSRYGSFSREQFAYFFIYKARNPRKEQTLFEFAQVPVRLSAQIRQDENALERYARELAKDQ
GLEFIRIERSKILKNQLIEIDGDRLCITGKEEVRNACELAFAQDEMRVIRMLVSEKPVSRECVI
SLFNRILLHGDQASRRLSKQLKLALLSEAFSEASDNVQRNVVLGLIAIFNGSTNMVNLSDIGGS
KFAGNVRIKYKKELASPKVNVHLIDQSVTGMFERRTKIGL
SEQ ID NO: 317
MENKQYYIGLDVGTNSVGWAVTDTSYNLLRAKGKDMWGARLFEKANTAAERRTKRTSRRRSERE
KARKAMLKELFADEINRVDPSFFIRLEESKFFLDDRSENNRQRYTLFNDATFTDKDYYEKYKTI
FHLRSALINSDEKFDVRLVFLAILNLFSHRGHFLNASLKGDGDIQGMDVFYNDLVESCEYFEIE
LPRITNIDNFEKILSQKGKSRTKILEELSEELSISKKDKSKYNLIKLISGLEASVVELYNIEDI
QDENKKIKIGFRESDYEESSLKVKEIIGDEYFDLVERAKSVHDMGLLSNIIGNSKYLCEARVEA
YENHHKDLLKIKELLKKYDKKAYNDMFRKMTDKNYSAYVGSVNSNIAKERRSVDKRKIEDLYKY
IEDTALKNIPDDNKDKIEILEKIKLGEFLKKQLTASNGVIPNQLQSRELRAILKKAENYLPFLK
EKGEKNLTVSEMIIQLFEFQIPYYVGPLDKNPKKDNKANSWAKIKQGGRILPWNFEDKVDVKGS
RKEFIEKMVRKCTYISDEHTLPKQSLLYEKFMVLNEINNIKIDGEKISVEAKQKIYNDLFVKGK
KVSQKDIKKELISLNIMDKDSVLSGTDTVCNAYLSSIGKFTGVFKEEINKQSIVDMIEDIIFLK
TVYGDEKRFVKEEIVEKYGDEIDKDKIKRILGFKFSNWGNLSKSFLELEGADVGTGEVRSIIQS
LWETNFNLMELLSSRFTYMDELEKRVKKLEKPLSEWTIEDLDDMYLSSPVKRMIWQSMKIVDEI
QTVIGYAPKRIFVEMTRSEGEKVRTKSRKDRLKELYNGIKEDSKQWVKELDSKDESYFRSKKMY
LYYLQKGRCMYSGEVIELDKLMDDNLYDIDHIYPRSFVKDDSLDNLVLVKKEINNRKQNDPITP
QIQASCQGFWKILHDQGFMSNEKYSRLTRKTQEFSDEEKLSFINRQIVETGQATKCMAQILQKS
MGEDVDVVFSKARLVSEFRHKFELFKSRLINDFHHANDAYLNIVVGNSYFVKFTRNPANFIKDA
RKNPDNPVYKYHMDRFFERDVKSKSEVAWIGQSEGNSGTIVIVKKTMAKNSPLITKKVEEGHGS
ITKETIVGVKEIKFGRNKVEKADKTPKKPNLQAYRPIKTSDERLCNILRYGGRTSISISGYCLV
EYVKKRKTIRSLEAIPVYLGRKDSLSEEKLLNYFRYNLNDGGKDSVSDIRLCLPFISTNSLVKI
DGYLYYLGGKNDDRIQLYNAYQLKMKKEEVEYIRKIEKAVSMSKFDEIDREKNPVLTEEKNIEL
YNKIQDKFENTVFSKRMSLVKYNKKDLSFGDFLKNKKSKFEEIDLEKQCKVLYNIIFNLSNLKE
VDLSDIGGSKSTGKCRCKKNITNYKEFKLIQQSITGLYSCEKDLMTI
SEQ ID NO: 318
MKNLKEYYIGLDIGTASVGWAVTDESYNIPKFNGKKMWGVRLFDDAKTAEERRTQRGSRRRLNR
RKERINLLQDLFATEISKVDPNFFLRLDNSDLYREDKDEKLKSKYTLFNDKDFKDRDYHKKYPT
IHHLIMDLIEDEGKKDIRLLYLACHYLLKNRGHFIFEGQKFDTKNSFDKSINDLKIHLRDEYNI
DLEFNNEDLIEIITDTTLNKTNKKKELKNIVGDTKFLKAISAIMIGSSQKLVDLFEDGEFEETT
VKSVDFSTTAFDDKYSEYEEALGDTISLLNILKSIYDSSILENLLKDADKSKDGNKYISKAFVK
KFNKHGKDLKTLKRIIKKYLPSEYANIFRNKSINDNYVAYTKSNITSNKRTKASKFTKQEDFYK
FIKKHLDTIKETKLNSSENEDLKLIDEMLTDIEFKTFIPKLKSSDNGVIPYQLKLMELKKILDN
QSKYYDFLNESDEYGTVKDKVESIMEFRIPYYVGPLNPDSKYAWIKRENTKITPWNFKDIVDLD
SSREEFIDRLIGRCTYLKEEKVLPKASLIYNEFMVLNELNNLKLNEFLITEEMKKAIFEELFKT
KKKVTLKAVSNLLKKEFNLTGDILLSGTDGDFKQGLNSYIDFKNIIGDKVDRDDYRIKIEEIIK
LIVLYEDDKTYLKKKIKSAYKNDFTDDEIKKIAALNYKDWGRLSKRFLTGIEGVDKTTGEKGSI
IYFMREYNLNLMELMSGHYTFTEEVEKLNPVENRELCYEMVDELYLSPSVKRMLWQSLRVVDEI
KRIIGKDPKKIFIEMARAKEAKNSRKESRKNKLLEFYKFGKKAFINEIGEERYNYLLNEINSEE
ESKFRWDNLYLYYTQLGRCMYSLEPIDLADLKSNNIYDQDHIYPKSKIYDDSLENRVLVKKNLN
HEKGNQYPIPEKVLNKNAYGFWKILFDKGLIGQKKYTRLTRRTPFEERELAEFIERQIVETRQA
TKETANLLKNICQDSEIVYSKAENASRFRQEFDIIKCRTVNDLHHMHDAYLNIVVGNVYNTKFT
KNPLNFIKDKDNVRSYNLENMFKYDVVRGSYTAWIADDSEGNVKAATIKKVKRELEGKNYRFTR
MSYIGTGGLYDQNLMRKGKGQIPQKENTNKSNIEKYGGYNKASSAYFALIESDGKAGRERTLET
IPIMVYNQEKYGNTEAVDKYLKDNLELQDPKILKDKIKINSLIKLDGFLYNIKGKTGDSLSIAG
SVQLIVNKEEQKLIKKMDKFLVKKKDNKDIKVTSFDNIKEEELIKLYKTLSDKLNNGIYSNKRN
NQAKNISEALDKFKEISIEEKIDVLNQIILLFQSYNNGCNLKSIGLSAKTGVVFIPKKLNYKEC
KLINQSITGLFENEVDLLNL
SEQ ID NO: 319
MGKMYYLGLDIGTNSVGYAVTDPSYHLLKFKGEPMWGAHVFAAGNQSAERRSFRTSRRRLDRRQ
QRVKLVQEIFAPVISPIDPRFFIRLHESALWRDDVAETDKHIFFNDPTYTDKEYYSDYPTIHHL
IVDLMESSEKHDPRLVYLAVAWLVAHRGHFLNEVDKDNIGDVLSFDAFYPEFLAFLSDNGVSPW
VCESKALQATLLSRNSVNDKYKALKSLIFGSQKPEDNFDANISEDGLIQLLAGKKVKVNKLFPQ
ESNDASFTLNDKEDAIEEILGTLTPDECEWIAHIRRLFDWAIMKHALKDGRTISESKVKLYEQH
HHDLTQLKYFVKTYLAKEYDDIFRNVDSETTKNYVAYSYHVKEVKGTLPKNKATQEEFCKYVLG
KVKNIECSEADKVDFDEMIQRLTDNSFMPKQVSGENRVIPYQLYYYELKTILNKAASYLPFLTQ
CGKDAISNQDKLLSIMTFRIPYFVGPLRKDNSEHAWLERKAGKIYPWNFNDKVDLDKSEEAFIR
RMTNTCTYYPGEDVLPLDSLIYEKFMILNEINNIRIDGYPISVDVKQQVFGLFEKKRRVTVKDI
QNLLLSLGALDKHGKLTGIDTTIHSNYNTYHHFKSLMERGVLTRDDVERIVERMTYSDDTKRVR
LWLNNNYGTLTADDVKHISRLRKHDFGRLSKMFLTGLKGVHKETGERASILDFMWNTNDNLMQL
LSECYTFSDEITKLQEAYYAKAQLSLNDFLDSMYISNAVKRPIYRTLAVVNDIRKACGTAPKRI
FIEMARDGESKKKRSVTRREQIKNLYRSIRKDFQQEVDFLEKILENKSDGQLQSDALYLYFAQL
GRDMYTGDPIKLEHIKDQSFYNIDHIYPQSMVKDDSLDNKVLVQSEINGEKSSRYPLDAAIRNK
MKPLWDAYYNHGLISLKKYQRLTRSTPFTDDEKWDFINRQLVETRQSTKALAILLKRKFPDTEI
VYSKAGLSSDFRHEFGLVKSRNINDLHHAKDAFLAIVTGNVYHERFNRRWFMVNQPYSVKTKTL
FTHSIKNGNFVAWNGEEDLGRIVKMLKQNKNTIHFTRFSFDRKEGLFDIQPLKASTGLVPRKAG
LDVVKYGGYDKSTAAYYLLVRFTLEDKKTQHKLMMIPVEGLYKARIDHDKEFLTDYAQTTISEI
LQKDKQKVINIMFPMGTRHIKLNSMISIDGFYLSIGGKSSKGKSVLCHAMVPLIVPHKIECYIK
AMESFARKFKENNKLRIVEKFDKITVEDNLNLYELFLQKLQHNPYNKFFSTQFDVLTNGRSTFT
KLSPEEQVQTLLNILSIFKTCRSSGCDLKSINGSAQAARIMISADLTGLSKKYSDIRLVEQSAS
GLFVSKSQNLLEYL
SEQ ID NO: 320
MTKKEQPYNIGLDIGTSSVGWAVTNDNYDLLNIKKKNLWGVRLFEEAQTAKETRLNRSTRRRYR
RRKNRINWLNEIFSEELAKTDPSFLIRLQNSWVSKKDPDRKRDKYNLFIDGPYTDKEYYREFPT
IFHLRKELILNKDKADIRLIYLALHNILKYRGNFTYEHQKFNISNLNNNLSKELIELNQQLIKY
DISFPDDCDWNHISDILIGRGNATQKSSNILKDFTLDKETKKLLKEVINLILGNVAHLNTIFKT
SLTKDEEKLNFSGKDIESKLDDLDSILDDDQFTVLDAANRIYSTITLNEILNGESYFSMAKVNQ
YENHAIDLCKLRDMWHTTKNEEAVEQSRQAYDDYINKPKYGTKELYTSLKKFLKVALPTNLAKE
AEEKISKGTYLVKPRNSENGVVPYQLNKIEMEKIIDNQSQYYPFLKENKEKLLSILSFRIPYYV
GPLQSAEKNPFAWMERKSNGHARPWNFDEIVDREKSSNKFIRRMTVTDSYLVGEPVLPKNSLIY
QRYEVLNELNNIRITENLKTNPIGSRLTVETKQRIYNELFKKYKKVTVKKLTKWLIAQGYYKNP
ILIGLSQKDEFNSTLTTYLDMKKIFGSSFMEDNKNYDQIEELIEWLTIFEDKQILNEKLHSSKY
SYTPDQIKKISNMRYKGWGRLSKKILMDITTETNTPQLLQLSNYSILDLMWATNNNFISIMSND
KYDFKNYIENHNLNKNEDQNISDLVNDIHVSPALKRGITQSIKIVQEIVKFMGHAPKHIFIEVT
RETKKSEITTSREKRIKRLQSKLLNKANDFKPQLREYLVPNKKIQEELKKHKNDLSSERIMLYF
LQNGKSLYSEESLNINKLSDYQVDHILPRTYIPDDSLENKALVLAKENQRKADDLLLNSNVIDR
NLERWTYMLNNNMIGLKKFKNLTRRVITDKDKLGFIHRQLVQTSQMVKGVANILDNMYKNQGTT
CIQARANLSTAFRKALSGQDDTYHFKHPELVKNRNVNDFHHAQDAYLASFLGTYRLRRFPTNEM
LLMNGEYNKFYGQVKELYSKKKKLPDSRKNGFIISPLVNGTTQYDRNTGEIIWNVGFRDKILKI
FNYHQCNVTRKTEIKTGQFYDQTIYSPKNPKYKKLIAQKKDMDPNIYGGFSGDNKSSITIVKID
NNKIKPVAIPIRLINDLKDKKTLQNWLEENVKHKKSIQIIKNNVPIGQIIYSKKVGLLSLNSDR
EVANRQQLILPPEHSALLRLLQIPDEDLDQILAFYDKNILVEILQELITKMKKFYPFYKGEREF
LIANIENFNQATTSEKVNSLEELITLLHANSTSAHLIFNNIEKKAFGRKTHGLTLNNTDFIYQS
VTGLYETRIHIE
SEQ ID NO: 321
MTKFNKNYSIGLDIGVSSVGYAVVTEDYRVPAFKFKVLGNTEKEKIKKNLIGSTTFVSAQPAKG
TRVFRVNRRRIDRRNHRITYLRDIFQKEIEKVDKNFYRRLDESFRVLGDKSEDLQIKQPFFGDK
ELETAYHKKYPTIYHLRKHLADADKNSPVADIREVYMAISHILKYRGHFLTLDKINPNNINMQN
SWIDFIESCQEVFDLEISDESKNIADIFKSSENRQEKVKKILPYFQQELLKKDKSIFKQLLQLL
FGLKTKFKDCFELEEEPDLNFSKENYDENLENFLGSLEEDFSDVFAKLKVLRDTILLSGMLTYT
GATHARFSATMVERYEEHRKDLQRFKFFIKQNLSEQDYLDIFGRKTQNGFDVDKETKGYVGYIT
NKMVLTNPQKQKTIQQNFYDYISGKITGIEGAEYFLNKISDGTFLRKLRTSDNGAIPNQIHAYE
LEKIIERQGKDYPFLLENKDKLLSILTFKIPYYVGPLAKGSNSRFAWIKRATSSDILDDNDEDT
RNGKIRPWNYQKLINMDETRDAFITNLIGNDIILLNEKVLPKRSLIYEEVMLQNELTRVKYKDK
YGKAHFFDSELRQNIINGLFKNNSKRVNAKSLIKYLSDNHKDLNAIEIVSGVEKGKSFNSTLKT
YNDLKTIFSEELLDSEIYQKELEEIIKVITVFDDKKSIKNYLTKFFGHLEILDEEKINQLSKLR
YSGWGRYSAKLLLDIRDEDTGFNLLQFLRNDEENRNLTKLISDNTLSFEPKIKDIQSKSTIEDD
IFDEIKKLAGSPAIKRGILNSIKIVDELVQIIGYPPHNIVIEMARENMTTEEGQKKAKTRKTKL
ESALKNIENSLLENGKVPHSDEQLQSEKLYLYYLQNGKDMYTLDKTGSPAPLYLDQLDQYEVDH
IIPYSFLPIDSIDNKVLTHRENNQQKLNNIPDKETVANMKPFWEKLYNAKLISQTKYQRLTTSE
RTPDGVLTESMKAGFIERQLVETRQIIKHVARILDNRFSDTKIITLKSQLITNFRNTFHIAKIR
ELNDYHHAHDAYLAVVVGQTLLKVYPKLAPELIYGHHAHFNRHEENKATLRKHLYSNIMRFFNN
PDSKVSKDIWDCNRDLPIIKDVIYNSQINFVKRTMIKKGAFYNQNPVGKFNKQLAANNRYPLKT
KALCLDTSIYGGYGPMNSALSIIIIAERFNEKKGKIETVKEFHDIFIIDYEKFNNNPFQFLNDT
SENGFLKKNNINRVLGFYRIPKYSLMQKIDGTRMLFESKSNLHKATQFKLTKTQNELFFHMKRL
LTKSNLMDLKSKSAIKESQNFILKHKEEFDNISNQLSAFSQKMLGNTTSLKNLIKGYNERKIKE
IDIRDETIKYFYDNFIKMFSFVKSGAPKDINDFFDNKCTVARMRPKPDKKLLNATLIHQSITGL
YETRIDLSKLGED
SEQ ID NO: 322
MKQEYFLGLDMGTGSLGWAVTDSTYQVMRKHGKALWGTRLFESASTAEERRMFRTARRRLDRRN
WRIQVLQEIFSEEISKVDPGFFLRMKESKYYPEDKRDAEGNCPELPYALFVDDNYTDKNYHKDY
PTIYHLRKMLMETTEIPDIRLVYLVLHHMMKHRGHFLLSGDISQIKEFKSTFEQLIQNIQDEEL
EWHISLDDAAIQFVEHVLKDRNLTRSTKKSRLIKQLNAKSACEKAILNLLSGGTVKLSDIFNNK
ELDESERPKVSFADSGYDDYIGIVEAELAEQYYIIASAKAVYDWSVLVEILGNSVSISEAKIKV
YQKHQADLKTLKKIVRQYMTKEDYKRVFVDTEEKLNNYSAYIGMTKKNGKKVDLKSKQCTQADF
YDFLKKNVIKVIDHKEITQEIESEIEKENFLPKQVTKDNGVIPYQVHDYELKKILDNLGTRMPF
IKENAEKIQQLFEFRIPYYVGPLNRVDDGKDGKFTWSVRKSDARIYPWNFTEVIDVEASAEKFI
RRMTNKCTYLVGEDVLPKDSLVYSKFMVLNELNNLRLNGEKISVELKQRIYEELFCKYRKVTRK
KLERYLVIEGIAKKGVEITGIDGDFKASLTAYHDFKERLTDVQLSQRAKEAIVLNVVLFGDDKK
LLKQRLSKMYPNLTTGQLKGICSLSYQGWGRLSKTFLEEITVPAPGTGEVWNIMTALWQTNDNL
MQLLSRNYGFTNEVEEFNTLKKETDLSYKTVDELYVSPAVKRQIWQTLKVVKEIQKVMGNAPKR
VFVEMAREKQEGKRSDSRKKQLVELYRACKNEERDWITELNAQSDQQLRSDKLFLYYIQKGRCM
YSGETIQLDELWDNTKYDIDHIYPQSKTMDDSLNNRVLVKKNYNAIKSDTYPLSLDIQKKMMSF
WKMLQQQGFITKEKYVRLVRSDELSADELAGFIERQIVETRQSTKAVATILKEALPDTEIVYVK
AGNVSNFRQTYELLKVREMNDLHHAKDAYLNIVVGNAYFVKFTKNAAWFIRNNPGRSYNLKRMF
EFDIERSGEIAWKAGNKGSIVTVKKVMQKNNILVTRKAYEVKGGLFDQQIMKKGKGQVPIKGND
ERLADIEKYGGYNKAAGTYFMLVKSLDKKGKEIRTIEFVPLYLKNQIEINHESAIQYLAQERGL
NSPEILLSKIKIDTLFKVDGFKMWLSGRTGNQLIFKGANQLILSHQEAAILKGVVKYVNRKNEN
KDAKLSERDGMTEEKLLQLYDTFLDKLSNTVYSIRLSAQIKTLTEKRAKFIGLSNEDQCIVLNE
ILHMFQCQSGSANLKLIGGPGSAGILVMNNNITACKQISVINQSPTGIYEKEIDLIKL
SEQ ID NO: 323
MKKPYSIGLDIGTNSVGWAVVTDDYKVPAKKMKVLGNTDKSHIEKNLLGALLFDSGNTAEDRRL
KRTARRRYTRRRNRILYLQEIFSEEMGKVDDSFFHRLEDSFLVTEDKRGERHPIFGNLEEEVKY
HENFPTIYHLRQYLADNPEKVDLRLVYLALAHIIKFRGHFLIEGKFDTRNNDVQRLFQEFLAVY
DNTFENSSLQEQNVQVEEILTDKISKSAKKDRVLKLFPNEKSNGRFAEFLKLIVGNQADFKKHF
ELEEKAPLQFSKDTYEEELEVLLAQIGDNYAELFLSAKKLYDSILLSGILTVTDVGTKAPLSAS
MIQRYNEHQMDLAQLKQFIRQKLSDKYNEVFSDVSKDGYAGYIDGKTNQEAFYKYLKGLLNKIE
GSGYFLDKIEREDFLRKQRTFDNGSIPHQIHLQEMRAIIRRQAEFYPFLADNQDRIEKLLTFRI
PYYVGPLARGKSDFAWLSRKSADKITPWNFDEIVDKESSAEAFINRMTNYDLYLPNQKVLPKHS
LLYEKFTVYNELTKVKYKTEQGKTAFFDANMKQEIFDGVFKVYRKVTKDKLMDFLEKEFDEFRI
VDLTGLDKENKVFNASYGTYHDLCKILDKDFLDNSKNEKILEDIVLTLTLFEDREMIRKRLENY
SDLLTKEQVKKLERRHYTGWGRLSAELIHGIRNKESRKTILDYLIDDGNSNRNFMQLINDDALS
FKEEIAKAQVIGETDNLNQVVSDIAGSPAIKKGILQSLKIVDELVKIMGHQPENIVVEMARENQ
FTNQGRRNSQQRLKGLTDSIKEFGSQILKEHPVENSQLQNDRLFLYYLQNGRDMYTGEELDIDY
LSQYDIDHIIPQAFIKDNSIDNRVLTSSKENRGKSDDVPSKDVVRKMKSYWSKLLSAKLITQRK
FDNLTKAERGGLTDDDKAGFIKRQLVETRQITKHVARILDERFNTETDENNKKIRQVKIVTLKS
NLVSNFRKEFELYKVREINDYHHAHDAYLNAVIGKALLGVYPQLEPEFVYGDYPHFHGHKENKA
TAKKFFYSNIMNFFKKDDVRTDKNGEIIWKKDEHISNIKKVLSYPQVNIVKKVEEQTGGFSKES
ILPKGNSDKLIPRKTKKFYWDTKKYGGFDSPIVAYSILVIADIEKGKSKKLKTVKALVGVTIME
KMTFERDPVAFLERKGYRNVQEENIIKLPKYSLFKLENGRKRLLASARELQKGNEIVLPNHLGT
LLYHAKNIHKVDEPKHLDYVDKHKDEFKELLDVVSNFSKKYTLAEGNLEKIKELYAQNNGEDLK
ELASSFINLLTFTAIGAPATFKFFDKNIDRKRYTSTTEILNATLIHQSITGLYETRIDLNKLGG
D
SEQ ID NO: 324
[sequence omitted]
SEQ ID NO: 325
MTKPYSIGLDIGTNSVGWAVTTDNYKVPSKKMKVLGNTSKKYIKKNLLGVLLFDSGITAEGRRL
KRTARRRYTRRRNRILYLQEIFSTEMATLDDAFFQRLDDSFLVPDDKRDSKYPIFGNLVEEKAY
HDEFPTIYHLRKYLADSTKKADLRLVYLALAHMIKYRGHFLIEGEFNSKNNDIQKNFQDFLDTY
NAIFESDLSLENSKQLEEIVKDKISKLEKKDRILKLFPGEKNSGIFSEFLKLIVGNQADFRKCF
NLDEKASLHFSKESYDEDLETLLGYIGDDYSDVFLKAKKLYDAILLSGFLTVTDNETEAPLSSA
MIKRYNEHKEDLALLKEYIRNISLKTYNEVFKDDTKNGYAGYIDGKTNQEDFYVYLKKLLAEFE
GADYFLEKIDREDFLRKQRTFDNGSIPYQIHLQEMRAILDKQAKFYPFLAKNKERIEKILTFRI
PYYVGPLARGNSDFAWSIRKRNEKITPWNFEDVIDKESSAEAFINRMTSFDLYLPEEKVLPKHS
LLYETFNVYNELTKVRFIAESMRDYQFLDSKQKKDIVRLYFKDKRKVTDKDIIEYLHAIYGYDG
IELKGIEKQFNSSLSTYHDLLNIINDKEFLDDSSNEAIIEEIIHTLTIFEDREMIKQRLSKFEN
IFDKSVLKKLSRRHYTGWGKLSAKLINGIRDEKSGNTILDYLIDDGISNRNFMQLIHDDALSFK
KKIQKAQIIGDEDKGNIKEVVKSLPGSPAIKKGILQSIKIVDELVKVMGGRKPESIVVEMAREN
QYTNQGKSNSQQRLKRLEKSLKELGSKILKENIPAKLSKIDNNALQNDRLYLYYLQNGKDMYTG
DDLDIDRLSNYDIDHIIPQAFLKDNSIDNKVLVSSASNRGKSDDVPSLEVVKKRKTFWYQLLKS
KLISQRKFDNLTKAERGGLSPEDKAGFIQRQLVETRQITKHVARLLDEKFNNKKDENNRAVRTV
KIITLKSTLVSQFRKDFELYKVREINDFHHAHDAYLNAVVASALLKKYPKLEPEFVYGDYPKYN
SFRERKSATEKVYFYSNIMNIFKKSISLADGRVIERPLIEVNEETGESVWNKESDLATVRRVLS
YPQVNVVKKVEEQNHGLDRGKPKGLFNANLSSKPKPNSNENLVGAKEYLDPKKYGGYAGISNSF
TVLVKGTIEKGAKKKITNVLEFQGISILDRINYRKDKLNFLLEKGYKDIELIIELPKYSLFELS
DGSRRMLASILSTNNKRGEIHKGNQIFLSQKFVKLLYHAKRISNTINENHRKYVENHKKEFEEL
FYYILEFNENYVGAKKNGKLLNSAFQSWQNHSIDELCSSFIGPTGSERKGLFELTSRGSAADFE
FLGVKIPRYRDYTPSSLLKDATLIHQSVTGLYETRIDLAKLGEG
SEQ ID NO: 326
MKKQKFSDYYLGFDIGTNSVGWCVTDLDYNVLRFNKKDMWGSRLFDEAKTAAERRVQRNSRRRL
KRRKWRLNLLEEIFSDEIMKIDSNFFRRLKESSLWLEDKNSKEKFTLFNDDNYKDYDFYKQYPT
IFHLRDELIKNPEKKDIRLIYLALHSIFKSRGHFLFEGQNLKEIKNFETLYNNLISFLEDNGIN
KSIDKDNIEKLEKIICDSGKGLKDKEKEFKGIFNSDKQLVAIFKLSVGSSVSLNDLFDTDEYKK
EEVEKEKISFREQIYEDDKPIYYSILGEKIELLDIAKSFYDFMVLNNILSDSNYISEAKVKLYE
EHKKDLKNLKYIIRKYNKENYDKLFKDKNENNYPAYIGLNKEKDKKEVVEKSRLKIDDLIKVIK
GYLPKPERIEEKDKTIFNEILNKIELKTILPKQRISDNGTLPYQIHEVELEKILENQSKYYDFL
NYEENGVSTKDKLLKTFKFRIPYYVGPLNSYHKDKGGNSWIVRKEEGKILPWNFEQKVDIEKSA
EEFIKRMTNKCTYLNGEDVIPKDSFLYSEYIILNELNKVQVNDEFLNEENKRKIIDELFKENKK
VSEKKFKEYLLVNQIANRTVELKGIKDSFNSNYVSYIKFKDIFGEKLNLDIYKEISEKSILWKC
LYGDDKKIFEKKIKNEYGDILNKDEIKKINSFKFNTWGRLSEKLLTGIEFINLETGECYSSVME
ALRRTNYNLMELLSSKFTLQESIDNENKEMNEVSYRDLIEESYVSPSLKRAILQTLKIYEEIKK
ITGRVPKKVFIEMARGGDESMKNKKIPARQEQLKKLYDSCGNDIANFSIDIKEMKNSLSSYDNN
SLRQKKLYLYYLQFGKCMYTGREIDLDRLLQNNDTYDIDHIYPRSKVIKDDSFDNLVLVLKNEN
AEKSNEYPVKKEIQEKMKSFWRFLKEKNFISDEKYKRLTGKDDFELRGFMARQLVNVRQTTKEV
GKILQQIEPEIKIVYSKAEIASSFREMFDFIKVRELNDTHHAKDAYLNIVAGNVYNTKFTEKPY
RYLQEIKENYDVKKIYNYDIKNAWDKENSLEIVKKNMEKNTVNITRFIKEEKGELFNLNPIKKG
ETSNEIISIKPKLYDGKDNKLNEKYGYYTSLKAAYFIYVEHEKKNKKVKTFERITRIDSTLIKN
EKNLIKYLVSQKKLLNPKIIKKIYKEQTLIIDSYPYTFTGVDSNKKVELKNKKQLYLEKKYEQI
LKNALKFVEDNQGETEENYKFIYLKKRNNNEKNETIDAVKERYNIEFNEMYDKFLEKLSSKDYK
NYINNKLYTNFLNSKEKFKKLKLWEKSLILREFLKIFNKNTYGKYEIKDSQTKEKLFSFPEDTG
RIRLGQSSLGNNKELLEESVTGLFVKKIKL
SEQ ID NO: 327
MKNYTIGLDIGVASVGWVCIDENYKILNYNNRHAFGVHEFESAESAAGRRLKRGMRRRYNRRKK
RLQLLQSLFDSYITDSGFFSKTDSQHFWKNNNEFENRSLTEVLSSLRISSRKYPTIYHLRSDLI
ESNKKMDLRLVYLALHNLVKYRGHFLQEGNWSEAASAEGMDDQLLELVTRYAELENLSPLDLSE
SQWKAAETLLLNRNLTKTDQSKELTAMFGKEYEPFCKLVAGLGVSLHQLFPSSEQALAYKETKT
KVQLSNENVEEVMELLLEEESALLEAVQPFYQQVVLYELLKGETYVAKAKVSAFKQYQKDMASL
KNLLDKTFGEKVYRSYFISDKNSQREYQKSHKVEVLCKLDQFNKEAKFAETFYKDLKKLLEDKS
KTSIGTTEKDEMLRIIKAIDSNQFLQKQKGIQNAAIPHQNSLYEAEKILRNQQAHYPFITTEWI
EKVKQILAFRIPYYIGPLVKDTTQSPFSWVERKGDAPITPWNFDEQIDKAASAEAFISRMRKTC
TYLKGQEVLPKSSLTYERFEVLNELNGIQLRTTGAESDFRHRLSYEMKCWIIDNVFKQYKTVST
KRLLQELKKSPYADELYDEHTGEIKEVFGTQKENAFATSLSGYISMKSILGAVVDDNPAMTEEL
IYWIAVFEDREILHLKIQEKYPSITDVQRQKLALVKLPGWGRFSRLLIDGLPLDEQGQSVLDHM
EQYSSVFMEVLKNKGFGLEKKIQKMNQHQVDGTKKIRYEDIEELAGSPALKRGIWRSVKIVEEL
VSIFGEPANIVLEVAREDGEKKRTKSRKDQWEELTKTTLKNDPDLKSFIGEIKSQGDQRFNEQR
FWLYVTQQGKCLYTGKALDIQNLSMYEVDHILPQNFVKDDSLDNLALVMPEANQRKNQVGQNKM
PLEIIEANQQYAMRTLWERLHELKLISSGKLGRLKKPSFDEVDKDKFIARQLVETRQIIKHVRD
LLDERFSKSDIHLVKAGIVSKFRRFSEIPKIRDYNNKHHAMDALFAAALIQSILGKYGKNFLAF
DLSKKDRQKQWRSVKGSNKEFFLFKNFGNLRLQSPVTGEEVSGVEYMKHVYFELPWQTTKMTQT
GDGMFYKESIFSPKVKQAKYVSPKTEKFVHDEVKNHSICLVEFTFMKKEKEVQETKFIDLKVIE
HHQFLKEPESQLAKFLAEKETNSPIIHARIIRTIPKYQKIWIEHFPYYFISTRELHNARQFEIS
YELMEKVKQLSERSSVEELKIVFGLLIDQMNDNYPIYTKSSIQDRVQKFVDTQLYDFKSFEIGF
EELKKAVAANAQRSDTFGSRISKKPKPEEVAIGYESITGLKYRKPRSVVGTKR
SEQ ID NO: 328
MKKEIKDYFLGLDVGTGSVGWAVTDTDYKLLKANRKDLWGMRCFETAETAEVRRLHRGARRRIE
RRKKRIKLLQELFSQEIAKTDEGFFQRMKESPFYAEDKTILQENTLFNDKDFADKTYHKAYPTI
NHLIKAWIENKVKPDPRLLYLACHNIIKKRGHFLFEGDFDSENQFDTSIQALFEYLREDMEVDI
DADSQKVKEILKDSSLKNSEKQSRLNKILGLKPSDKQKKAITNLISGNKINFADLYDNPDLKDA
EKNSISFSKDDFDALSDDLASILGDSFELLLKAKAVYNCSVLSKVIGDEQYLSFAKVKIYEKHK
TDLTKLKNVIKKHFPKDYKKVFGYNKNEKNNNNYSGYVGVCKTKSKKLIINNSVNQEDFYKFLK
TILSAKSEIKEVNDILTEIETGTFLPKQISKSNAEIPYQLRKMELEKILSNAEKHFSFLKQKDE
KGLSHSEKIIMLLTFKIPYYIGPINDNHKKFFPDRCWVVKKEKSPSGKTTPWNFFDHIDKEKTA
EAFITSRTNFCTYLVGESVLPKSSLLYSEYTVLNEINNLQIIIDGKNICDIKLKQKIYEDLFKK
YKKITQKQISTFIKHEGICNKTDEVIILGIDKECTSSLKSYIELKNIFGKQVDEISTKNMLEEI
IRWATIYDEGEGKTILKTKIKAEYGKYCSDEQIKKILNLKFSGWGRLSRKFLETVTSEMPGFSE
PVNIITAMRETQNNLMELLSSEFTFTENIKKINSGFEDAEKQFSYDGLVKPLFLSPSVKKMLWQ
TLKLVKEISHITQAPPKKIFIEMAKGAELEPARTKTRLKILQDLYNNCKNDADAFSSEIKDLSG
KIENEDNLRLRSDKLYLYYTQLGKCMYCGKPIEIGHVFDTSNYDIDHIYPQSKIKDDSISNRVL
VCSSCNKNKEDKYPLKSEIQSKQRGFWNFLQRNNFISLEKLNRLTRATPISDDETAKFIARQLV
ETRQATKVAAKVLEKMFPETKIVYSKAETVSMFRNKFDIVKCREINDFHHAHDAYLNIVVGNVY
NTKFTNNPWNFIKEKRDNPKIADTYNYYKVFDYDVKRNNITAWEKGKTIITVKDMLKRNTPIYT
RQAACKKGELFNQTIMKKGLGQHPLKKEGPFSNISKYGGYNKVSAAYYTLIEYEEKGNKIRSLE
TIPLYLVKDIQKDQDVLKSYLTDLLGKKEFKILVPKIKINSLLKINGFPCHITGKTNDSFLLRP
AVQFCCSNNEVLYFKKIIRFSEIRSQREKIGKTISPYEDLSFRSYIKENLWKKTKNDEIGEKEF
YDLLQKKNLEIYDMLLTKHKDTIYKKRPNSATIDILVKGKEKFKSLIIENQFEVILEILKLFSA
TRNVSDLQHIGGSKYSGVAKIGNKISSLDNCILIYQSITGIFEKRIDLLKV
SEQ ID NO: 329
MEGQMKNNGNNLQQGNYYLGLDVGTSSVGWAVTDTDYNVLKFRGKSMWGARLFDEASTAEERRT
HRGNRRRLARRKYRLLLLEQLFEKEIRKIDDNFFVRLHESNLWADDKSKPSKFLLFNDTNFTDK
DYLKKYPTIYHLRSDLIHNSTEHDIRLVFLALHHLIKYRGHFIYDNSANGDVKTLDEAVSDFEE
YLNENDIEFNIENKKEFINVLSDKHLTKKEKKISLKKLYGDITDSENINISVLIEMLSGSSISL
SNLFKDIEFDGKQNLSLDSDIEETLNDVVDILGDNIDLLIHAKEVYDIAVLTSSLGKHKYLCDA
KVELFEKNKKDLMILKKYIKKNHPEDYKKIFSSPTEKKNYAAYSQTNSKNVCSQEEFCLFIKPY
IRDMVKSENEDEVRIAKEVEDKSFLTKLKGTNNSVVPYQIHERELNQILKNIVAYLPFMNDEQE
DISVVDKIKLIFKFKIPYYVGPLNTKSTRSWVYRSDEKIYPWNFSNVIDLDKTAHEFMNRLIGR
CTYTNDPVLPMDSLLYSKYNVLNEINPIKVNGKAIPVEVKQAIYTDLFENSKKKVTRKSIYIYL
LKNGYIEKEDIVSGIDIEIKSKLKSHHDFTQIVQENKCTPEEIERIIKGILVYSDDKSMLRRWL
KNNIKGLSENDVKYLAKLNYKEWGRLSKTLLTDIYTINPEDGEACSILDIMWNTNATLMEILSN
EKYQFKQNIENYKAENYDEKQNLHEELDDMYISPAARRSIWQALRIVDEIVDIKKSAPKKIFIE
MAREKKSAMKKKRTESRKDTLLELYKSCKSQADGFYDEELFEKLSNESNSRLRRDQLYLYYTQM
GRSMYTGKRIDFDKLINDKNTYDIDHIYPRSKIKDDSITNRVLVEKDINGEKTDIYPISEDIRQ
KMQPFWKILKEKGLINEEKYKRLTRNYELTDEELSSFVARQLVETQQSTKALATLLKKEYPSAK
IVYSKAGNVSEFRNRKDKELPKFREINDLHHAKDAYLNIVVGNVYDTKFTEKFFNNIRNENYSL
KRVFDFSVPGAWDAKGSTFNTIKKYMAKNNPIIAFAPYEVKGELFDQQIVPKGKGQFPIKQGKD
IEKYGGYNKLSSAFLFAVEYKGKKARERSLETVYIKDVELYLQDPIKYCESVLGLKEPQIIKPK
ILMGSLFSINNKKLVVTGRSGKQYVCHHIYQLSINDEDSQYLKNIAKYLQEEPDGNIERQNILN
ITSVNNIKLFDVLCTKFNSNTYEIILNSLKNDVNEGREKFSELDILEQCNILLQLLKAFKCNRE
SSNLEKLNNKKQAGVIVIPHLFTKCSVFKVIHQSITGLFEKEMDLLK
SEQ ID NO: 330
MGRKPYILSLDIGTGSVGYACMDKGFNVLKYHDKDALGVYLFDGALTAQERRQFRTSRRRKNRR
IKRLGLLQELLAPLVQNPNFYQFQRQFAWKNDNMDFKNKSLSEVLSFLGYESKKYPTIYHLQEA
LLLKDEKFDPELIYMALYHLVKYRGHFLFDHLKIENLTNNDNMHDFVELIETYENLNNIKLNLD
YEKTKVIYEILKDNEMTKNDRAKRVKNMEKKLEQFSIMLLGLKFNEGKLFNHADNAEELKGANQ
SHTFADNYEENLTPFLTVEQSEFIERANKIYLSLTLQDILKGKKSMAMSKVAAYDKFRNELKQV
KDIVYKADSTRTQFKKIFVSSKKSLKQYDATPNDQTFSSLCLFDQYLIRPKKQYSLLIKELKKI
IPQDSELYFEAENDTLLKVLNTTDNASIPMQINLYEAETILRNQQKYHAEITDEMIEKVLSLIQ
FRIPYYVGPLVNDHTASKFGWMERKSNESIKPWNFDEVVDRSKSATQFIRRMTNKCSYLINEDV
LPKNSLLYQEMEVLNELNATQIRLQTDPKNRKYRMMPQIKLFAVEHIFKKYKTVSHSKFLEIML
NSNHRENFMNHGEKLSIFGTQDDKKFASKLSSYQDMTKIFGDIEGKRAQIEEIIQWITIFEDKK
ILVQKLKECYPELTSKQINQLKKLNYSGWGRLSEKLLTHAYQGHSIIELLRHSDENFMEILTND
VYGFQNFIKEENQVQSNKIQHQDIANLTTSPALKKGIWSTIKLVRELTSIFGEPEKIIMEFATE
DQQKGKKQKSRKQLWDDNIKKNKLKSVDEYKYIIDVANKLNNEQLQQEKLWLYLSQNGKCMYSG
QSIDLDALLSPNATKHYEVDHIFPRSFIKDDSIDNKVLVIKKMNQTKGDQVPLQFIQQPYERIA
YWKSLNKAGLISDSKLHKLMKPEFTAMDKEGFIQRQLVETRQISVHVRDFLKEEYPNTKVIPMK
AKMVSEFRKKFDIPKIRQMNDAHHAIDAYLNGVVYHGAQLAYPNVDLFDFNFKWEKVREKWKAL
GEFNTKQKSRELFFFKKLEKMEVSQGERLISKIKLDMNHFKINYSRKLANIPQQFYNQTAVSPK
TAELKYESNKSNEVVYKGLTPYQTYVVAIKSVNKKGKEKMEYQMIDHYVFDFYKFQNGNEKELA
LYLAQRENKDEVLDAQIVYSLNKGDLLYINNHPCYFVSRKEVINAKQFELTVEQQLSLYNVMNN
KETNVEKLLIEYDFIAEKVINEYHHYLNSKLKEKRVRTFFSESNQTHEDFIKALDELFKVVTAS
ATRSDKIGSRKNSMTHRAFLGKGKDVKIAYTSISGLKTTKPKSLFKLAESRNEL
SEQ ID NO: 331
MAKILGLDLGTNSIGWAVVERENIDFSLIDKGVRIFSEGVKSEKGIESSRAAERTGYRSARKIK
YRRKLRKYETLKVLSLNRMCPLSIEEVEEWKKSGFKDYPLNPEFLKWLSTDEESNVNPYFFRDR
ASKHKVSLFELGRAFYHIAQRRGFLSNRLDQSAEGILEEHCPKIEAIVEDLISIDEISTNITDY
FFETGILDSNEKNGYAKDLDEGDKKLVSLYKSLLAILKKNESDFENCKSEIIERLNKKDVLGKV
KGKIKDISQAMLDGNYKTLGQYFYSLYSKEKIRNQYTSREEHYLSEFITICKVQGIDQINEEEK
INEKKFDGLAKDLYKAIFFQRPLKSQKGLIGKCSFEKSKSRCAISHPDFEEYRMWTYLNTIKIG
TQSDKKLRFLTQDEKLKLVPKFYRKNDFNFDVLAKELIEKGSSFGFYKSSKKNDFFYWFNYKPT
DTVAACQVAASLKNAIGEDWKTKSFKYQTINSNKEQVSRTVDYKDLWHLLTVATSDVYLYEFAI
DKLGLDEKNAKAFSKTKLKKDFASLSLSAINKILPYLKEGLLYSHAVFVANIENIVDENIWKDE
KQRDYIKTQISEIIENYTLEKSRFEIINGLLKEYKSENEDGKRVYYSKEAEQSFENDLKKKLVL
FYKSNEIENKEQQETIFNELLPIFIQQLKDYEFIKIQRLDQKVLIFLKGKNETGQIFCTEEKGT
AEEKEKKIKNRLKKLYHPSDIEKFKKKIIKDEFGNEKIVLGSPLTPSIKNPMAMRALHQLRKVL
NALILEGQIDEKTIIHIEMARELNDANKRKGIQDYQNDNKKFREDAIKEIKKLYFEDCKKEVEP
TEDDILRYQLWMEQNRSEIYEEGKNISICDIIGSNPAYDIEHTIPRSRSQDNSQMNKTLCSQRF
NREVKKQSMPIELNNHLEILPRIAHWKEEADNLTREIEIISRSIKAAATKEIKDKKIRRRHYLT
LKRDYLQGKYDRFIWEEPKVGFKNSQIPDTGIITKYAQAYLKSYFKKVESVKGGMVAEFRKIWG
IQESFIDENGMKHYKVKDRSKHTHHTIDAITIACMTKEKYDVLAHAWTLEDQQNKKEARSIIEA
SKPWKTFKEDLLKIEEEILVSHYTPDNVKKQAKKIVRVRGKKQFVAEVERDVNGKAVPKKAASG
KTIYKLDGEGKKLPRLQQGDTIRGSLHQDSIYGAIKNPLNTDEIKYVIRKDLESIKGSDVESIV
DEVVKEKIKEAIANKVLLLSSNAQQKNKLVGTVWMNEEKRIAINKVRIYANSVKNPLHIKEHSL
LSKSKHVHKQKVYGQNDENYAMAIYELDGKRDFELINIFNLAKLIKQGQGFYPLHKKKEIKGKI
VFVPIEKRNKRDVVLKRGQQVVFYDKEVENPKDISEIVDFKGRIYIIEGLSIQRIVRPSGKVDE
YGVIMLRYFKEARKADDIKQDNFKPDGVFKLGENKPTRKMNHQFTAFVEGIDFKVLPSGKFEKI
SEQ ID NO: 332
MEFKKVLGLDIGTNSIGCALLSLPKSIQDYGKGGRLEWLTSRVIPLDADYMKAFIDGKNGLPQV
ITPAGKRRQKRGSRRLKHRYKLRRSRLIRVFKTLNWLPEDFPLDNPKRIKETISTEGKFSFRIS
DYVPISDESYREFYREFGYPENEIEQVIEEINFRRKTKGKNKNPMIKLLPEDWVVYYLRKKALI
KPTTKEELIRIIYLFNQRRGFKSSRKDLTETAILDYDEFAKRLAEKEKYSAENYETKFVSITKV
KEVVELKTDGRKGKKRFKVILEDSRIEPYEIERKEKPDWEGKEYTFLVTQKLEKGKFKQNKPDL
PKEEDWALCTTALDNRMGSKHPGEFFFDELLKAFKEKRGYKIRQYPVNRWRYKKELEFIWTKQC
QLNPELNNLNINKEILRKLATVLYPSQSKFFGPKIKEFENSDVLHIISEDIIYYQRDLKSQKSL
ISECRYEKRKGIDGEIYGLKCIPKSSPLYQEFRIWQDIHNIKVIRKESEVNGKKKINIDETQLY
INENIKEKLFELFNSKDSLSEKDILELISLNIINSGIKISKKEEETTHRINLFANRKELKGNET
KSRYRKVFKKLGFDGEYILNHPSKLNRLWHSDYSNDYADKEKTEKSILSSLGWKNRNGKWEKSK
NYDVFNLPLEVAKAIANLPPLKKEYGSYSALAIRKMLVVMRDGKYWQHPDQIAKDQENTSLMLF
DKNLIQLTNNQRKVLNKYLLTLAEVQKRSTLIKQKLNEIEHNPYKLELVSDQDLEKQVLKSFLE
KKNESDYLKGLKTYQAGYLIYGKHSEKDVPIVNSPDELGEYIRKKLPNNSLRNPIVEQVIRETI
FIVRDVWKSFGIIDEIHIELGRELKNNSEERKKTSESQEKNFQEKERARKLLKELLNSSNFEHY
DENGNKIFSSFTVNPNPDSPLDIEKFRIWKNQSGLTDEELNKKLKDEKIPTEIEVKKYILWLTQ
KCRSPYTGKIIPLSKLFDSNVYEIEHIIPRSKMKNDSTNNLVICELGVNKAKGDRLAANFISES
NGKCKFGEVEYTLLKYGDYLQYCKDTFKYQKAKYKNLLATEPPEDFIERQINDTRYIGRKLAEL
LTPVVKDSKNIIFTIGSITSELKITWGLNGVWKDILRPRFKRLESIINKKLIFQDEDDPNKYHF
DLSINPQLDKEGLKRLDHRHHALDATIIAATTREHVRYLNSLNAADNDEEKREYFLSLCNHKIR
DFKLPWENFTSEVKSKLLSCVVSYKESKPILSDPFNKYLKWEYKNGKWQKVFAIQIKNDRWKAV
RRSMFKEPIGTVWIKKIKEVSLKEAIKIQAIWEEVKNDPVRKKKEKYIYDDYAQKVIAKIVQEL
GLSSSMRKQDDEKLNKFINEAKVSAGVNKNLNTTNKTIYNLEGRFYEKIKVAEYVLYKAKRMPL
NKKEYIEKLSLQKMFNDLPNFILEKSILDNYPEILKELESDNKYIIEPHKKNNPVNRLLLEHIL
EYHNNPKEAFSTEGLEKLNKKAINKIGKPIKYITRLDGDINEEEIFRGAVFETDKGSNVYFVMY
ENNQTKDREFLKPNPSISVLKAIEHKNKIDFFAPNRLGFSRIILSPGDLVYVPTNDQYVLIKDN
SSNETIINWDDNEFISNRIYQVKKFTGNSCYFLKNDIASLILSYSASNGVGEFGSQNISEYSVD
DPPIRIKDVCIKIRVDRLGNVRPL
SEQ ID NO: 333
MKHILGLDLGTNSIGWALIERNIEEKYGKIIGMGSRIVPMGAELSKFEQGQAQTKNADRRTNRG
ARRLNKRYKQRRNKLIYILQKLDMLPSQIKLKEDFSDPNKIDKITILPISKKQEQLTAFDLVSL
RVKALTEKVGLEDLGKIIYKYNQLRGYAGGSLEPEKEDIFDEEQSKDKKNKSFIAFSKIVFLGE
PQEEIFKNKKLNRRAIIVETEEGNFEGSTFLENIKVGDSLELLINISASKSGDTITIKLPNKTN
WRKKMENIENQLKEKSKEMGREFYISEFLLELLKENRWAKIRNNTILRARYESEFEAIWNEQVK
HYPFLENLDKKTLIEIVSFIFPGEKESQKKYRELGLEKGLKYIIKNQVVFYQRELKDQSHLISD
CRYEPNEKAIAKSHPVFQEYKVWEQINKLIVNTKIEAGTNRKGEKKYKYIDRPIPTALKEWIFE
ELQNKKEITFSAIFKKLKAEFDLREGIDFLNGMSPKDKLKGNETKLQLQKSLGELWDVLGLDSI
NRQIELWNILYNEKGNEYDLTSDRTSKVLEFINKYGNNIVDDNAEETAIRISKIKFARAYSSLS
LKAVERILPLVRAGKYFNNDFSQQLQSKILKLLNENVEDPFAKAAQTYLDNNQSVLSEGGVGNS
IATILVYDKHTAKEYSHDELYKSYKEINLLKQGDLRNPLVEQIINEALVLIRDIWKNYGIKPNE
IRVELARDLKNSAKERATIHKRNKDNQTINNKIKETLVKNKKELSLANIEKVKLWEAQRHLSPY
TGQPIPLSDLFDKEKYDVDHIIPISRYFDDSFTNKVISEKSVNQEKANRTAMEYFEVGSLKYSI
FTKEQFIAHVNEYFSGVKRKNLLATSIPEDPVQRQIKDTQYIAIRVKEELNKIVGNENVKTTTG
SITDYLRNHWGLTDKFKLLLKERYEALLESEKFLEAEYDNYKKDFDSRKKEYEEKEVLFEEQEL
TREEFIKEYKENYIRYKKNKLIIKGWSKRIDHRHHAIDALIVACTEPAHIKRLNDLNKVLQDWL
VEHKSEFMPNFEGSNSELLEEILSLPENERTEIFTQIEKFRAIEMPWKGFPEQVEQKLKEIIIS
HKPKDKLLLQYNKAGDRQIKLRGQLHEGTLYGISQGKEAYRIPLTKFGGSKFATEKNIQKIVSP
FLSGFIANHLKEYNNKKEEAFSAEGIMDLNNKLAQYRNEKGELKPHTPISTVKIYYKDPSKNKK
KKDEEDLSLQKLDREKAFNEKLYVKTGDNYLFAVLEGEIKTKKTSQIKRLYDIISFFDATNFLK
EEFRNAPDKKTFDKDLLFRQYFEERNKAKLLFTLKQGDFVYLPNENEEVILDKESPLYNQYWGD
LKERGKNIYVVQKFSKKQIYFIKHTIADIIKKDVEFGSQNCYETVEGRSIKENCFKLEIDRLGN
IVKVIKR
SEQ ID NO: 334
MHVEIDFPHFSRGDSHLAMNKNEILRGSSVLYRLGLDLGSNSLGWFVTHLEKRGDRHEPVALGP
GGVRIFPDGRDPQSGTSNAVDRRMARGARKRRDRFVERRKELIAALIKYNLLPDDARERRALEV
LDPYALRKTALTDTLPAHHVGRALFHLNQRRGFQSNRKTDSKQSEDGAIKQAASRLATDKGNET
LGVFFADMHLRKSYEDRQTAIRAELVRLGKDHLTGNARKKIWAKVRKRLFGDEVLPRADAPHGV
RARATITGTKASYDYYPTRDMLRDEFNAIWAGQSAHHATITDEARTEIEHIIFYQRPLKPAIVG
KCTLDPATRPFKEDPEGYRAPWSHPLAQRFRILSEARNLEIRDTGKGSRRLTKEQSDLVVAALL
ANREVKFDKLRTLLKLPAEARFNLESDRRAALDGDQTAARLSDKKGFNKAWRGFPPERQIAIVA
RLEETEDENELIAWLEKECALDGAAAARVANTTLPDGHCRLGLRAIKKIVPIMQDGLDEDGVAG
AGYHIAAKRAGYDHAKLPTGEQLGRLPYYGQWLQDAVVGSGDARDQKEKQYGQFPNPTVHIGLG
QLRRVVNDLIDKYGPPTEISIEFTRALKLSEQQKAERQREQRRNQDKNKARAEELAKFGRPANP
RNLLKMRLWEELAHDPLDRKCVYTGEQISIERLLSDEVDIDHILPVAMTLDDSPANKIICMRYA
NRHKRKQTPSEAFGSSPTLQGHRYNWDDIAARATGLPRNKRWRFDANAREEFDKRGGFLARQLN
ETGWLARLAKQYLGAVTDPNQIWVVPGRLTSMLRGKWGLNGLLPSDNYAGVQDKAEEFLASTDD
MEFSGVKNRADHRHHAIDGLVTALTDRSLLWKMANAYDEEHEKFVIEPPWPTMRDDLKAALEKM
VVSHKPDHGIEGKLHEDSAYGFVKPLDATGLKEEEAGNLVYRKAIESLNENEVDRIRDIQLRTI
VRDHVNVEKTKGVALADALRQLQAPSDDYPQFKHGLRHVRILKKEKGDYLVPIANRASGVAYKA
YSAGENFCVEVFETAGGKWDGEAVRRFDANKKNAGPKIAHAPQWRDANEGAKLVMRIHKGDLIR
LDHEGRARIMVVHRLDAAAGRFKLADHNETGNLDKRHATNNDIDPFRWLMASYNTLKKLAAVPV
RVDELGRVWRVMPN
SEQ ID NO: 335
METTLGIDLGTNSIGLALVDQEEHQILYSGVRIFPEGINKDTIGLGEKEESRNATRRAKRQMRR
QYFRKKLRKAKLLELLIAYDMCPLKPEDVRRWKNWDKQQKSTVRQFPDTPAFREWLKQNPYELR
KQAVTEDVTRPELGRILYQMIQRRGFLSSRKGKEEGKIFTGKDRMVGIDETRKNLQKQTLGAYL
YDIAPKNGEKYRFRTERVRARYTLRDMYIREFEIIWQRQAGHLGLAHEQATRKKNIFLEGSATN
VRNSKLITHLQAKYGRGHVLIEDTRITVTFQLPLKEVLGGKIEIEEEQLKFKSNESVLFWQRPL
RSQKSLLSKCVFEGRNFYDPVHQKWIIAGPTPAPLSHPEFEEFRAYQFINNIIYGKNEHLTAIQ
REAVFELMCTESKDFNFEKIPKHLKLFEKFNFDDTTKVPACTTISQLRKLFPHPVWEEKREEIW
HCFYFYDDNTLLFEKLQKDYALQTNDLEKIKKIRLSESYGNVSLKAIRRINPYLKKGYAYSTAV
LLGGIRNSFGKRFEYFKEYEPEIEKAVCRILKEKNAEGEVIRKIKDYLVHNRFGFAKNDRAFQK
LYHHSQAITTQAQKERLPETGNLRNPIVQQGLNELRRTVNKLLATCREKYGPSFKFDHIHVEMG
RELRSSKTEREKQSRQIRENEKKNEAAKVKLAEYGLKAYRDNIQKYLLYKEIEEKGGTVCCPYT
GKTLNISHTLGSDNSVQIEHIIPYSISLDDSLANKTLCDATFNREKGELTPYDFYQKDPSPEKW
GASSWEEIEDRAFRLLPYAKAQRFIRRKPQESNEFISRQLNDTRYISKKAVEYLSAICSDVKAF
PGQLTAELRHLWGLNNILQSAPDITFPLPVSATENHREYYVITNEQNEVIRLFPKQGETPRTEK
GELLLTGEVERKVFRCKGMQEFQTDVSDGKYWRRIKLSSSVTWSPLFAPKPISADGQIVLKGRI
EKGVFVCNQLKQKLKTGLPDGSYWISLPVISQTFKEGESVNNSKLTSQQVQLFGRVREGIFRCH
NYQCPASGADGNFWCTLDTDTAQPAFTPIKNAPPGVGGGQIILTGDVDDKGIFHADDDLHYELP
ASLPKGKYYGIFTVESCDPTLIPIELSAPKTSKGENLIEGNIWVDEHTGEVRFDPKKNREDQRH
HAIDAIVIALSSQSLFQRLSTYNARRENKKRGLDSTEHFPSPWPGFAQDVRQSVVPLLVSYKQN
PKTLCKISKTLYKDGKKIHSCGNAVRGQLHKETVYGQRTAPGATEKSYHIRKDIRELKTSKHIG
KVVDITIRQMLLKHLQENYHIDITQEFNIPSNAFFKEGVYRIFLPNKHGEPVPIKKIRMKEELG
NAERLKDNINQYVNPRNNHHVMIYQDADGNLKEEIVSFWSVIERQNQGQPIYQLPREGRNIVSI
LQINDTFLIGLKEEEPEVYRNDLSTLSKHLYRVQKLSGMYYTFRHHLASTLNNEREEFRIQSLE
AWKRANPVKVQIDEIGRITFLNGPLC
SEQ ID NO: 336
MESSQILSPIGIDLGGKFTGVCLSHLEAFAELPNHANTKYSVILIDHNNFQLSQAQRRATRHRV
RNKKRNQFVKRVALQLFQHILSRDLNAKEETALCHYLNNRGYTYVDTDLDEYIKDETTINLLKE
LLPSESEHNFIDWFLQKMQSSEFRKILVSKVEEKKDDKELKNAVKNIKNFITGFEKNSVEGHRH
RKVYFENIKSDITKDNQLDSIKKKIPSVCLSNLLGHLSNLQWKNLHRYLAKNPKQFDEQTFGNE
FLRMLKNFRHLKGSQESLAVRNLIQQLEQSQDYISILEKTPPEITIPPYEARTNTGMEKDQSLL
LNPEKLNNLYPNWRNLIPGIIDAHPFLEKDLEHTKLRDRKRIISPSKQDEKRDSYILQRYLDLN
KKIDKFKIKKQLSFLGQGKQLPANLIETQKEMETHFNSSLVSVLIQIASAYNKEREDAAQGIWF
DNAFSLCELSNINPPRKQKILPLLVGAILSEDFINNKDKWAKFKIFWNTHKIGRTSLKSKCKEI
EEARKNSGNAFKIDYEEALNHPEHSNNKALIKIIQTIPDIIQAIQSHLGHNDSQALIYHNPFSL
SQLYTILETKRDGFHKNCVAVTCENYWRSQKTEIDPEISYASRLPADSVRPFDGVLARMMQRLA
YEIAMAKWEQIKHIPDNSSLLIPIYLEQNRFEFEESFKKIKGSSSDKTLEQAIEKQNIQWEEKF
QRIINASMNICPYKGASIGGQGEIDHIYPRSLSKKHFGVIFNSEVNLIYCSSQGNREKKEEHYL
LEHLSPLYLKHQFGTDNVSDIKNFISQNVANIKKYISFHLLTPEQQKAARHALFLDYDDEAFKT
ITKFLMSQQKARVNGTQKFLGKQIMEFLSTLADSKQLQLEFSIKQITAEEVHDHRELLSKQEPK
LVKSRQQSFPSHAIDATLTMSIGLKEFPQFSQELDNSWFINHLMPDEVHLNPVRSKEKYNKPNI
SSTPLFKDSLYAERFIPVWVKGETFAIGFSEKDLFEIKPSNKEKLFTLLKTYSTKNPGESLQEL
QAKSKAKWLYFPINKTLALEFLHHYFHKEIVTPDDTTVCHFINSLRYYTKKESITVKILKEPMP
VLSVKFESSKKNVLGSFKHTIALPATKDWERLFNHPNFLALKANPAPNPKEFNEFIRKYFLSDN
NPNSDIPNNGHNIKPQKHKAVRKVFSLPVIPGNAGTMMRIRRKDNKGQPLYQLQTIDDTPSMGI
QINEDRLVKQEVLMDAYKTRNLSTIDGINNSEGQAYATFDNWLTLPVSTFKPEIIKLEMKPHSK
TRRYIRITQSLADFIKTIDEALMIKPSDSIDDPLNMPNEIVCKNKLFGNELKPRDGKMKIVSTG
KIVTYEFESDSTPQWIQTLYVTQLKKQP
SEQ ID NO: 337
MKKIVGLDLGTNSIGWALINAYINKEHLYGIEACGSRIIPMDAAILGNFDKGNSISQTADRTSY
RGIRRLRERHLLRRERLHRILDLLGFLPKHYSDSLNRYGKFLNDIECKLPWVKDETGSYKFIFQ
ESFKEMLANFTEHHPILIANNKKVPYDWTIYYLRKKALTQKISKEELAWILLNFNQKRGYYQLR
GEEEETPNKLVEYYSLKVEKVEDSGERKGKDTWYNVHLENGMIYRRTSNIPLDWEGKTKEFIVT
TDLEADGSPKKDKEGNIKRSFRAPKDDDWTLIKKKTEADIDKIKMTVGAYIYDTLLQKPDQKIR
GKLVRTIERKYYKNELYQILKTQSEFHEELRDKQLYIACLNELYPNNEPRRNSISTRDFCHLFI
EDIIFYQRPLKSKKSLIDNCPYEENRYIDKESGEIKHASIKCIAKSHPLYQEFRLWQFIVNLRI
YRKETDVDVTQELLPTEADYVTLFEWLNEKKEIDQKAFFKYPPFGFKKTTSNYRWNYVEDKPYP
CNETHAQIIARLGKAHIPKAFLSKEKEETLWHILYSIEDKQEIEKALHSFANKNNLSEEFIEQF
KNFPPFKKEYGSYSAKAIKKLLPLMRMGKYWSIENIDNGTRIRINKIIDGEYDENIRERVRQKA
INLTDITHFRALPLWLACYLVYDRHSEVKDIVKWKTPKDIDLYLKSFKQHSLRNPIVEQVITET
LRTVRDIWQQVGHIDEIHIELGREMKNPADKRARMSQQMIKNENTNLRIKALLTEFLNPEFGIE
NVRPYSPSQQDLLRIYEEGVLNSILELPEDIGIILGKFNQTDTLKRPTRSEILRYKLWLEQKYR
SPYTGEMIPLSKLFTPAYEIEHIIPQSRYFDDSLSNKVICESEINKLKDRSLGYEFIKNHHGEK
VELAFDKPVEVLSVEAYEKLVHESYSHNRSKMKKLLMEDIPDQFIERQLNDSRYISKVVKSLLS
NIVREENEQEAISKNVIPCTGGITDRLKKDWGINDVWNKIVLPRFIRLNELTESTRFTSINTNN
TMIPSMPLELQKGFNKKRIDHRHHAMDAIIIACANRNIVNYLNNVSASKNTKITRRDLQTLLCH
KDKTDNNGNYKWVIDKPWETFTQDTLTALQKITVSFKQNLRVINKTTNHYQHYENGKKIVSNQS
KGDSWAIRKSMHKETVHGEVNLRMIKTVSFNEALKKPQAIVEMDLKKKILAMLELGYDTKRIKN
YFEENKDTWQDINPSKIKVYYFTKETKDRYFAVRKPIDTSFDKKKIKESITDTGIQQIMLRHLE
TKDNDPTLAFSPDGIDEMNRNILILNKGKKHQPIYKVRVYEKAEKFTVGQKGNKRTKFVEAAKG
TNLFFAIYETEEIDKDTKKVIRKRSYSTIPLNVVIERQKQGLSSAPEDENGNLPKYILSPNDLV
YVPTQEEINKGEVVMPIDRDRIYKMVDSSGITANFIPASTANLIFALPKATAEIYCNGENCIQN
EYGIGSPQSKNQKAITGEMVKEICFPIKVDRLGNIIQVGSCILTN
SEQ ID NO: 338
MSRSLTFSFDIGYASIGWAVIASASHDDADPSVCGCGTVLFPKDDCQAFKRREYRRLRRNIRSR
RVRIERIGRLLVQAQIITPEMKETSGHPAPFYLASEALKGHRTLAPIELWHVLRWYAHNRGYDN
NASWSNSLSEDGGNGEDTERVKHAQDLMDKHGTATMAETICRELKLEEGKADAPMEVSTPAYKN
LNTAFPRLIVEKEVRRILELSAPLIPGLTAEIIELIAQHHPLTTEQRGVLLQHGIKLARRYRGS
LLFGQLIPRFDNRIISRCPVTWAQVYEAELKKGNSEQSARERAEKLSKVPTANCPEFYEYRMAR
ILCNIRADGEPLSAEIRRELMNQARQEGKLTKASLEKAISSRLGKETETNVSNYFTLHPDSEEA
LYLNPAVEVLQRSGIGQILSPSVYRIAANRLRRGKSVTPNYLLNLLKSRGESGEALEKKIEKES
KKKEADYADTPLKPKYATGRAPYARTVLKKVVEEILDGEDPTRPARGEAHPDGELKAHDGCLYC
LLDTDSSVNQHQKERRLDTMTNNHLVRHRMLILDRLLKDLIQDFADGQKDRISRVCVEVGKELT
TFSAMDSKKIQRELTLRQKSHTDAVNRLKRKLPGKALSANLIRKCRIAMDMNWTCPFTGATYGD
HELENLELEHIVPHSFRQSNALSSLVLTWPGVNRMKGQRTGYDFVEQEQENPVPDKPNLHICSL
NNYRELVEKLDDKKGHEDDRRRKKKRKALLMVRGLSHKHQSQNHEAMKEIGMTEGMMTQSSHLM
KLACKSIKTSLPDAHIDMIPGAVTAEVRKAWDVFGVFKELCPEAADPDSGKILKENLRSLTHLH
HALDACVLGLIPYIIPAHHNGLLRRVLAMRRIPEKLIPQVRPVANQRHYVLNDDGRMMLRDLSA
SLKENIREQLMEQRVIQHVPADMGGALLKETMQRVLSVDGSGEDAMVSLSKKKDGKKEKNQVKA
SKLVGVFPEGPSKLKALKAAIEIDGNYGVALDPKPVVIRHIKVFKRIMALKEQNGGKPVRILKK
GMLIHLTSSKDPKHAGVWRIESIQDSKGGVKLDLQRAHCAVPKNKTHECNWREVDLISLLKKYQ
MKRYPTSYTGTPR
SEQ ID NO: 339
MTQKVLGLDLGTNSIGSAVRNLDLSDDLQWQLEFFSSDIFRSSVNKESNGREYSLAAQRSAHRR
SRGLNEVRRRRLWATLNLLIKHGFCPMSSESLMRWCTYDKRKGLFREYPIDDKDFNAWILLDFN
GDGRPDYSSPYQLRRELVTRQFDFEQPIERYKLGRALYHIAQHRGFKSSKGETLSQQETNSKPS
STDEIPDVAGAMKASEEKLSKGLSTYMKEHNLLTVGAAFAQLEDEGVRVRNNNDYRAIRSQFQH
EIETIFKFQQGLSVESELYERLISEKKNVGTIFYKRPLRSQRGNVGKCTLERSKPRCAIGHPLF
EKFRAWTLINNIKVRMSVDTLDEQLPMKLRLDLYNECFLAFVRTEFKFEDIRKYLEKRLGIHFS
YNDKTINYKDSTSVAGCPITARFRKMLGEEWESFRVEGQKERQAHSKNNISFHRVSYSIEDIWH
FCYDAEEPEAVLAFAQETLRLERKKAEELVRIWSAMPQGYAMLSQKAIRNINKILMLGLKYSDA
VILAKVPELVDVSDEELLSIAKDYYLVEAQVNYDKRINSIVNGLIAKYKSVSEEYRFADHNYEY
LLDESDEKDIIRQIENSLGARRWSLMDANEQTDILQKVRDRYQDFFRSHERKFVESPKLGESFE
NYLTKKFPMVEREQWKKLYHPSQITIYRPVSVGKDRSVLRLGNPDIGAIKNPTVLRVLNTLRRR
VNQLLDDGVISPDETRVVVETARELNDANRKWALDTYNRIRHDENEKIKKILEEFYPKRDGIST
DDIDKARYVIDQREVDYFTGSKTYNKDIKKYKFWLEQGGQCMYTGRTINLSNLFDPNAFDIEHT
IPESLSFDSSDMNLTLCDAHYNRFIKKNHIPTDMPNYDKAITIDGKEYPAITSQLQRWVERVER
LNRNVEYWKGQARRAQNKDRKDQCMREMHLWKMELEYWKKKLERFTVTEVTDGFKNSQLVDTRV
ITRHAVLYLKSIFPHVDVQRGDVTAKFRKILGIQSVDEKKDRSLHSHHAIDATTLTIIPVSAKR
DRMLELFAKIEEINKMLSFSGSEDRTGLIQELEGLKNKLQMEVKVCRIGHNVSEIGTFINDNII
VNHHIKNQALTPVRRRLRKKGYIVGGVDNPRWQTGDALRGEIHKASYYGAITQFAKDDEGKVLM
KEGRPQVNPTIKFVIRRELKYKKSAADSGFASWDDLGKAIVDKELFALMKGQFPAETSFKDACE
QGIYMIKKGKNGMPDIKLHHIRHVRCEAPQSGLKIKEQTYKSEKEYKRYFYAAVGDLYAMCCYT
NGKIREFRIYSLYDVSCHRKSDIEDIPEFITDKKGNRLMLDYKLRTGDMILLYKDNPAELYDLD
NVNLSRRLYKINRFESQSNLVLMTHHLSTSKERGRSLGKTVDYQNLPESIRSSVKSLNFLIMGE
NRDFVIKNGKIIFNHR
SEQ ID NO: 340
MLVSPISVDLGGKNTGFFSFTDSLDNSQSGTVIYDESFVLSQVGRRSKRHSKRNNLRNKLVKRL
FLLILQEHHGLSIDVLPDEIRGLFNKRGYTYAGFELDEKKKDALESDTLKEFLSEKLQSIDRDS
DVEDFLNQIASNAESFKDYKKGFEAVFASATHSPNKKLELKDELKSEYGENAKELLAGLRVTKE
ILDEFDKQENQGNLPRAKYFEELGEYIATNEKVKSFFDSNSLKLTDMTKLIGNISNYQLKELRR
YFNDKEMEKGDIWIPNKLHKITERFVRSWHPKNDADRQRRAELMKDLKSKEIMELLTTTEPVMT
IPPYDDMNNRGAVKCQTLRLNEEYLDKHLPNWRDIAKRLNHGKFNDDLADSTVKGYSEDSTLLH
RLLDTSKEIDIYELRGKKPNELLVKTLGQSDANRLYGFAQNYYELIRQKVRAGIWVPVKNKDDS
LNLEDNSNMLKRCNHNPPHKKNQIHNLVAGILGVKLDEAKFAEFEKELWSAKVGNKKLSAYCKN
IEELRKTHGNTFKIDIEELRKKDPAELSKEEKAKLRLTDDVILNEWSQKIANFFDIDDKHRQRF
NNLFSMAQLHTVIDTPRSGFSSTCKRCTAENRFRSETAFYNDETGEFHKKATATCQRLPADTQR
PFSGKIERYIDKLGYELAKIKAKELEGMEAKEIKVPIILEQNAFEYEESLRKSKTGSNDRVINS
KKDRDGKKLAKAKENAEDRLKDKDKRIKAFSSGICPYCGDTIGDDGEIDHILPRSHTLKIYGTV
FNPEGNLIYVHQKCNQAKADSIYKLSDIKAGVSAQWIEEQVANIKGYKTFSVLSAEQQKAFRYA
LFLQNDNEAYKKVVDWLRTDQSARVNGTQKYLAKKIQEKLTKMLPNKHLSFEFILADATEVSEL
RRQYARQNPLLAKAEKQAPSSHAIDAVMAFVARYQKVFKDGTPPNADEVAKLAMLDSWNPASNE
PLTKGLSTNQKIEKMIKSGDYGQKNMREVFGKSIFGENAIGERYKPIVVQEGGYYIGYPATVKK
GYELKNCKVVTSKNDIAKLEKIIKNQDLISLKENQYIKIFSINKQTISELSNRYFNMNYKNLVE
RDKEIVGLLEFIVENCRYYTKKVDVKFAPKYIHETKYPFYDDWRRFDEAWRYLQENQNKTSSKD
RFVIDKSSLNEYYQPDKNEYKLDVDTQPIWDDFCRWYFLDRYKTANDKKSIRIKARKTFSLLAE
SGVQGKVFRAKRKIPTGYAYQALPMDNNVIAGDYANILLEANSKTLSLVPKSGISIEKQLDKKL
DVIKKTDVRGLAIDNNSFFNADFDTHGIRLIVENTSVKVGNFPISAIDKSAKRMIFRALFEKEK
GKRKKKTTISFKESGPVQDYLKVFLKKIVKIQLRTDGSISNIVVRKNAADFTLSFRSEHIQKLL
K
SEQ ID NO: 341
MAYRLGLDIGITSVGWAVVALEKDESGLKPVRIQDLGVRIFDKAEDSKTGASLALPRREARSAR
RRTRRRRHRLWRVKRLLEQHGILSMEQIEALYAQRTSSPDVYALRVAGLDRCLIAEEIARVLIH
IAHRRGFQSNRKSEIKDSDAGKLLKAVQENENLMQSKGYRTVAEMLVSEATKTDAEGKLVHGKK
HGYVSNVRNKAGEYRHTVSRQAIVDEVRKIFAAQRALGNDVMSEELEDSYLKILCSQRNFDDGP
GGDSPYGHGSVSPDGVRQSIYERMVGSCTFETGEKRAPRSSYSFERFQLLTKVVNLRIYRQQED
GGRYPCELTQTERARVIDCAYEQTKITYGKLRKLLDMKDTESFAGLTYGLNRSRNKTEDTVFVE
MKFYHEVRKALQRAGVFIQDLSIETLDQIGWILSVWKSDDNRRKKLSTLGLSDNVIEELLPLNG
SKFGHLSLKAIRKILPFLEDGYSYDVACELAGYQFQGKTEYVKQRLLPPLGEGEVTNPVVRRAL
SQAIKVVNAVIRKHGSPESIHIELARELSKNLDERRKIEKAQKENQKNNEQIKDEIREILGSAH
VTGRDIVKYKLFKQQQEFCMYSGEKLDVTRLFEPGYAEVDHIIPYGISFDDSYDNKVLVKTEQN
RQKGNRTPLEYLRDKPEQKAKFIALVESIPLSQKKKNHLLMDKRAIDLEQEGFRERNLSDTRYI
TRALMNHIQAWLLFDETASTRSKRVVCVNGAVTAYMRARWGLTKDRDAGDKHHAADAVVVACIG
DSLIQRVTKYDKFKRNALADRNRYVQQVSKSEGITQYVDKETGEVFTWESFDERKFLPNEPLEP
WPFFRDELLARLSDDPSKNIRAIGLLTYSETEQIDPIFVSRMPTRKVTGAAHKETIRSPRIVKV
DDNKGTEIQVVVSKVALTELKLTKDGEIKDYFRPEDDPRLYNTLRERLVQFGGDAKAAFKEPVY
KISKDGSVRTPVRKVKIQEKLTLGVPVHGGRGIAENGGMVRIDVFAKGGKYYFVPIYVADVLKR
ELPNRLATAHKPYSEWRVVDDSYQFKFSLYPNDAVMIKPSREVDITYKDRKEPVGCRIMYFVSA
NIASASISLRTHDNSGELEGLGIQGLEVFEKYVVGPLGDTHPVYKERRMPFRVERKMN
SEQ ID NO: 342
MPVLSPLSPNAAQGRRRWSLALDIGEGSIGWAVAEVDAEGRVLQLTGTGVTLFPSAWSNENGTY
VAHGAADRAVRGQQQRHDSRRRRLAGLARLCAPVLERSPEDLKDLTRTPPKADPRAIFFLRADA
ARRPLDGPELFRVLHHMAAHRGIRLAELQEVDPPPESDADDAAPAATEDEDGTRRAAADERAFR
RLMAEHMHRHGTQPTCGEIMAGRLRETPAGAQPVTRARDGLRVGGGVAVPTRALIEQEFDAIRA
IQAPRHPDLPWDSLRRLVLDQAPIAVPPATPCLFLEELRRRGETFQGRTITREAIDRGLTVDPL
IQALRIRETVGNLRLHERITEPDGRQRYVPRAMPELGLSHGELTAPERDTLVRALMHDPDGLAA
KDGRIPYTRLRKLIGYDNSPVCFAQERDTSGGGITVNPTDPLMARWIDGWVDLPLKARSLYVRD
VVARGADSAALARLLAEGAHGVPPVAAAAVPAATAAILESDIMQPGRYSVCPWAAEAILDAWAN
APTEGFYDVTRGLFGFAPGEIVLEDLRRARGALLAHLPRTMAAARTPNRAAQQRGPLPAYESVI
PSQLITSLRRAHKGRAADWSAADPEERNPFLRTWTGNAATDHILNQVRKTANEVITKYGNRRGW
DPLPSRITVELAREAKHGVIRRNEIAKENRENEGRRKKESAALDTFCQDNTVSWQAGGLPKERA
ALRLRLAQRQEFFCPYCAERPKLRATDLFSPAETEIDHVIERRMGGDGPDNLVLAHKDCNNAKG
KKTPHEHAGDLLDSPALAALWQGWRKENADRLKGKGHKARTPREDKDFMDRVGWRFEEDARAKA
EENQERRGRRMLHDTARATRLARLYLAAAVMPEDPAEIGAPPVETPPSPEDPTGYTAIYRTISR
VQPVNGSVTHMLRQRLLQRDKNRDYQTHHAEDACLLLLAGPAVVQAFNTEAAQHGADAPDDRPV
DLMPTSDAYHQQRRARALGRVPLATVDAALADIVMPESDRQDPETGRVHWRLTRAGRGLKRRID
DLTRNCVILSRPRRPSETGTPGALHNATHYGRREITVDGRTDTVVTQRMNARDLVALLDNAKIV
PAARLDAAAPGDTILKEICTEIADRHDRVVDPEGTHARRWISARLAALVPAHAEAVARDIAELA
DLDALADADRTPEQEARRSALRQSPYLGRAISAKKADGRARAREQEILTRALLDPHWGPRGLRH
LIMREARAPSLVRIRANKTDAFGRPVPDAAVWVKTDGNAVSQLWRLTSVVTDDGRRIPLPKPIE
KRIEISNLEYARLNGLDEGAGVTGNNAPPRPLRQDIDRLTPLWRDHGTAPGGYLGTAVGELEDK
ARSALRGKAMRQTLTDAGITAEAGWRLDSEGAVCDLEVAKGDTVKKDGKTYKVGVITQGIFGMP
VDAAGSAPRTPEDCEKFEEQYGIKPWKAKGIPLA
SEQ ID NO: 343
MNYTEKEKLFMKYILALDIGIASVGWAILDKESETVIEAGSNIFPEASAADNQLRRDMRGAKRN
NRRLKTRINDFIKLWENNNLSIPQFKSTEIVGLKVRAITEEITLDELYLILYSYLKHRGISYLE
DALDDTVSGSSAYANGLKLNAKELETHYPCEIQQERLNTIGKYRGQSQIINENGEVLDLSNVFT
IGAYRKEIQRVFEIQKKYHPELTDEFCDGYMLIFNRKRKYYEGPGNEKSRTDYGRFTTKLDANG
NYITEDNIFEKLIGKCSVYPDELRAAAASYTAQEYNVLNDLNNLTINGRKLEENEKHEIVERIK
SSNTINMRKIISDCMGENIDDFAGARIDKSGKEIFHKFEVYNKMRKALLEIGIDISNYSREELD
EIGYIMTINTDKEAMMEAFQKSWIDLSDDVKQCLINMRKTNGALFNKWQSFSLKIMNELIPEMY
AQPKEQMTLLTEMGVTKGTQEEFAGLKYIPVDVVSEDIFNPVVRRSVRISFKILNAVLKKYKAL
DTIVIEMPRDRNSEEQKKRINDSQKLNEKEMEYIEKKLAVTYGIKLSPSDFSSQKQLSLKLKLW
NEQDGICLYSGKTIDPNDIINNPQLFEIDHIIPRSISFDDARSNKVLVYRSENQKKGNQTPYYY
LTHSHSEWSFEQYKATVMNLSKKKEYAISRKKIQNLLYSEDITKMDVLKGFINRNINDTSYASR
LVLNTIQNFFMANEADTKVKVIKGSYTHQMRCNLKLDKNRDESYSHHAVDAMLIGYSELGYEAY
HKLQGEFIDFETGEILRKDMWDENMSDEVYADYLYGKKWANIRNEVVKAEKNVKYWHYVMRKSN
RGLCNQTIRGTREYDGKQYKINKLDIRTKEGIKVFAKLAFSKKDSDRERLLVYLNDRRTFDDLC
KIYEDYSDAANPFVQYEKETGDIIRKYSKKHNGPRIDKLKYKDGEVGACIDISHKYGFEKGSKK
VILESLVPYRMDVYYKEENHSYYLVGVKQSDIKFEKGRNVIDEEAYARILVNEKMIQPGQSRAD
LENLGFKFKLSFYKNDIIEYEKDGKIYTERLVSRTMPKQRNYIETKPIDKAKFEKQNLVGLGKT
KFIKKYRYDILGNKYSCSEEKFTSFC
SEQ ID NO: 344
MLRLYCANNLVLNNVQNLWKYLLLLIFDKKIIFLFKIKVILIRRYMENNNKEKIVIGFDLGVAS
VGWSIVNAETKEVIDLGVRLFSEPEKADYRRAKRTTRRLLRRKKFKREKFHKLILKNAEIFGLQ
SRNEILNVYKDQSSKYRNILKLKINALKEEIKPSELVWILRDYLQNRGYFYKNEKLTDEFVSNS
FPSKKLHEHYEKYGFFRGSVKLDNKLDNKKDKAKEKDEEEESDAKKESEELIFSNKQWINEIVK
VFENQSYLTESFKEEYLKLFNYVRPFNKGPGSKNSRTAYGVFSTDIDPETNKFKDYSNIWDKTI
GKCSLFEEEIRAPKNLPSALIFNLQNEICTIKNEFTEFKNWWLNAEQKSEILKFVFTELFNWKD
KKYSDKKFNKNLQDKIKKYLLNFALENFNLNEEILKNRDLENDTVLGLKGVKYYEKSNATADAA
LEFSSLKPLYVFIKFLKEKKLDLNYLLGLENTEILYFLDSIYLAISYSSDLKERNEWFKKLLKE
LYPKIKNNNLEIIENVEDIFEITDQEKFESFSKTHSLSREAFNHIIPLLLSNNEGKNYESLKHS
NEELKKRTEKAELKAQQNQKYLKDNFLKEALVPLSVKTSVLQAIKIFNQIIKNFGKKYEISQVV
IEMARELTKPNLEKLLNNATNSNIKILKEKLDQTEKFDDFTKKKFIDKIENSVVFRNKLFLWFE
QDRKDPYTQLDIKINEIEDETEIDHVIPYSKSADDSWFNKLLVKKSTNQLKKNKTVWEYYQNES
DPEAKWNKFVAWAKRIYLVQKSDKESKDNSEKNSIFKNKKPNLKFKNITKKLFDPYKDLGFLAR
NLNDTRYATKVFRDQLNNYSKHHSKDDENKLFKVVCMNGSITSFLRKSMWRKNEEQVYRFNFWK
KDRDQFFHHAVDASIIAIFSLLTKTLYNKLRVYESYDVQRREDGVYLINKETGEVKKADKDYWK
DQHNFLKIRENAIEIKNVLNNVDFQNQVRYSRKANTKLNTQLFNETLYGVKEFENNFYKLEKVN
LFSRKDLRKFILEDLNEESEKNKKNENGSRKRILTEKYIVDEILQILENEEFKDSKSDINALNK
YMDSLPSKFSEFFSQDFINKCKKENSLILTFDAIKHNDPKKVIKIKNLKFFREDATLKNKQAVH
KDSKNQIKSFYESYKCVGFIWLKNKNDLEESIFVPINSRVIHFGDKDKDIFDFDSYNKEKLLNE
INLKRPENKKFNSINEIEFVKFVKPGALLLNFENQQIYYISTLESSSLRAKIKLLNKMDKGKAV
SMKKITNPDEYKIIEHVNPLGINLNWTKKLENNN
SEQ ID NO: 345
MLMSKHVLGLDLGVGSIGWCLIALDAQGDPAEILGMGSRVVPLNNATKAIEAFNAGAAFTASQE
RTARRTMRRGFARYQLRRYRLRRELEKVGMLPDAALIQLPLLELWELRERAATAGRRLTLPELG
RVLCHINQKRGYRHVKSDAAAIVGDEGEKKKDSNSAYLAGIRANDEKLQAEHKTVGQYFAEQLR
QNQSESPTGGISYRIKDQIFSRQCYIDEYDQIMAVQRVHYPDILTDEFIRMLRDEVIFMQRPLK
SCKHLVSLCEFEKQERVMRVQQDDGKGGWQLVERRVKFGPKVAPKSSPLFQLCCIYEAVNNIRL
TRPNGSPCDITPEERAKIVAHLQSSASLSFAALKKLLKEKALIADQLTSKSGLKGNSTRVALAS
ALQPYPQYHHLLDMELETRMMTVQLTDEETGEVTEREVAVVTDSYVRKPLYRLWHILYSIEERE
AMRRALITQLGMKEEDLDGGLLDQLYRLDFVKPGYGNKSAKFICKLLPQLQQGLGYSEACAAVG
YRHSNSPTSEEITERTLLEKIPLLQRNELRQPLVEKILNQMINLVNALKAEYGIDEVRVELARE
LKMSREERERMARNNKDREERNKGVAAKIRECGLYPTKPRIQKYMLWKEAGRQCLYCGRSIEEE
QCLREGGMEVEHIIPKSVLYDDSYGNKTCACRRCNKEKGNRTALEYIRAKGREAEYMKRINDLL
KEKKISYSKHQRLRWLKEDIPSDFLERQLRLTQYISRQAMAILQQGIRRVSASEGGVTARLRSL
WGYGKILHTLNLDRYDSMGETERVSREGEATEELHITNWSKRMDHRHHAIDALVVACTRQSYIQ
RLNRLSSEFGREDKKKEDQEAQEQQATETGRLSNLERWLTQRPHFSVRTVSDKVAEILISYRPG
QRVVTRGRNIYRKKMADGREVSCVQRGVLVPRGELMEASFYGKILSQGRVRIVKRYPLHDLKGE
VVDPHLRELITTYNQELKSREKGAPIPPLCLDKDKKQEVRSVRCYAKTLSLDKAIPMCFDEKGE
PTAFVKSASNHHLALYRTPKGKLVESIVTFWDAVDRARYGIPLVITHPREVMEQVLQRGDIPEQ
VLSLLPPSDWVFVDSLQQDEMVVIGLSDEELQRALEAQNYRKISEHLYRVQKMSSSYYVFRYHL
ETSVADDKNTSGRIPKFHRVQSLKAYEERNIRKVRVDLLGRISLL
SEQ ID NO: 346
MSDLVLGLDIGIGSVGVGILNKVTGEIIHKNSRIFPAAQAENNLVRRTNRQGRRLARRKKHRRV
RLNRLFEESGLITDFTKISINLNPYQLRVKGLTDELSNEELFIALKNMVKHRGISYLDDASDDG
NSSVGDYAQIVKENSKQLETKTPGQIQLERYQTYGQLRGDFTVEKDGKKHRLINVFPTSAYRSE
ALRILQTQQEFNPQITDEFINRYLEILTGKRKYYHGPGNEKSRTDYGRYRTSGETLDNIFGILI
GKCTFYPDEFRAAKASYTAQEFNLLNDLNNLTVPTETKKLSKEQKNQIINYVKNEKAMGPAKLF
KYIAKLLSCDVADIKGYRIDKSGKAEIHTFEAYRKMKTLETLDIEQMDRETLDKLAYVLTLNTE
REGIQEALEHEFADGSFSQKQVDELVQFRKANSSIFGKGWHNFSVKLMMELIPELYETSEEQMT
ILTRLGKQKTTSSSNKTKYIDEKLLTEEIYNPVVAKSVRQAIKIVNAAIKEYGDFDNIVIEMAR
ETNEDDEKKAIQKIQKANKDEKDAAMLKAANQYNGKAELPHSVFHGHKQLATKIRLWHQQGERC
LYTGKTISIHDLINNSNQFEVDHILPLSITFDDSLANKVLVYATANQEKGQRTPYQALDSMDDA
WSFRELKAFVRESKTLSNKKKEYLLTEEDISKFDVRKKFIERNLVDTRYASRVVLNALQEHFRA
HKIDTKVSVVRGQFTSQLRRHWGIEKTRDTYHHHAVDALIIAASSQLNLWKKQKNTLVSYSEDQ
LLDIETGELISDDEYKESVFKAPYQHFVDTLKSKEFEDSILFSYQVDSKFNRKISDATIYATRQ
AKVGKDKADETYVLGKIKDIYTQDGYDAFMKIYKKDKSKFLMYRHDPQTFEKVIEPILENYPNK
QINEKGKEVPCNPFLKYKEEHGYIRKYSKKGNGPEIKSLKYYDSKLGNHIDITPKDSNNKVVLQ
SVSPWRADVYFNKTTGKYEILGLKYADLQFEKGTGTYKISQEKYNDIKKKEGVDSDSEFKFTLY
KNDLLLVKDTETKEQQLFRFLSRTMPKQKHYVELKPYDKQKFEGGEALIKVLGNVANSGQCKKG
LGKSNISIYKVRTDVLGNQHIIKNEGDKPKLDF
SEQ ID NO: 347
MNAEHGKEGLLIMEENFQYRIGLDIGITSVGWAVLQNNSQDEPVRITDLGVRIFDVAENPKNGD
ALAAPRRDARTTRRRLRRRRHRLERIKFLLQENGLIEMDSFMERYYKGNLPDVYQLRYEGLDRK
LKDEELAQVLIHIAKHRGFRSTRKAETKEKEGGAVLKATTENQKIMQEKGYRTVGEMLYLDEAF
HTECLWNEKGYVLTPRNRPDDYKHTILRSMLVEEVHAIFAAQRAHGNQKATEGLEEAYVEIMTS
QRSFDMGPGLQPDGKPSPYAMEGFGDRVGKCTFEKDEYRAPKATYTAELFVALQKINHTKLIDE
FGTGRFFSEEERKTIIGLLLSSKELKYGTIRKKLNIDPSLKFNSLNYSAKKEGETEEERVLDTE
KAKFASMFWTYEYSKCLKDRTEEMPVGEKADLFDRIGEILTAYKNDDSRSSRLKELGLSGEEID
GLLDLSPAKYQRVSLKAMRKMQPYLEDGLIYDKACEAAGYDFRALNDGNKKHLLKGEEINAIVN
DITNPVVKRSVSQTIKVINAIIQKYGSPQAVNIELAREMSKNFQDRTNLEKEMKKRQQENERAK
QQIIELGKQNPTGQDILKYRLWNDQGGYCLYSGKKIPLEELFDGGYDIDHILPYSITFDDSYRN
KVLVTAQENRQKGNRTPYEYFGADEKRWEDYEASVRLLVRDYKKQQKLLKKNFTEEERKEFKER
NLNDTKYITRVVYNMIRQNLELEPFNHPEKKKQVWAVNGAVTSYLRKRWGLMQKDRSTDRHHAM
DAVVIACCTDGMIHKISRYMQGRELAYSRNFKFPDEETGEILNRDNFTREQWDEKFGVKVPLPW
NSFRDELDIRLLNEDPKNFLLTHADVQRELDYPGWMYGEEESPIEEGRYINYIRPLFVSRMPNH
KVTGSAHDATIRSARDYETRGVVITKVPLTDLKLNKDNEIEGYYDKDSDRLLYQALVRQLLLHG
NDGKKAFAEDFHKPKADGTEGPVVRKVKIEKKQTSGVMVRGGTGIAANGEMVRIDVFRENGKYY
FVPVYTADVVRKVLPNRAATHTKPYSEWRVMDDANFVFSLYSRDLIHVKSKKDIKTNLVNGGLL
LQKEIFAYYTGADIATASIAGFANDSNFKFRGLGIQSLEIFEKCQVDILGNISVVRHENRQEFH
SEQ ID NO: 348
MRVLGLDAGIASLGWALIEIEESNRGELSQGTIIGAGTWMFDAPEEKTQAGAKLKSEQRRTFRG
QRRVVRRRRQRMNEVRRILHSHGLLPSSDRDALKQPGLDPWRIRAEALDRLLGPVELAVALGHI
ARHRGFKSNSKGAKTNDPADDTSKMKRAVNETREKLARFGSAAKMLVEDESFVLRQTPTKNGAS
EIVRRFRNREGDYSRSLLRDDLAAEMRALFTAQARFQSAIATADLQTAFTKAAFFQRPLQDSEK
LVGPCPFEVDEKRAPKRGYSFELFRFLSRLNHVTLRDGKQERTLTRDELALAAADFGAAAKVSF
TALRKKLKLPETTVFVGVKADEESKLDVVARSGKAAEGTARLRSVIVDALGELAWGALLCSPEK
LDKIAEVISFRSDIGRISEGLAQAGCNAPLVDALTAAASDGRFDPFTGAGHISSKAARNILSGL
RQGMTYDKACCAADYDHTASRERGAFDVGGHGREALKRILQEERISRELVGSPTARKALIESIK
QVKAIVERYGVPDRIHVELARDVGKSIEEREEITRGIEKRNRQKDKLRGLFEKEVGRPPQDGAR
GKEELLRFELWSEQMGRCLYTDDYISPSQLVATDDAVQVDHILPWSRFADDSYANKTLCMAKAN
QDKKGRTPYEWFKAEKTDTEWDAFIVRVEALADMKGFKKRNYKLRNAEEAAAKFRNRNLNDTRW
ACRLLAEALKQLYPKGEKDKDGKERRRVFSRPGALTDRLRRAWGLQWMKKSTKGDRIPDDRHHA
LDAIVIAATTESLLQRATREVQEIEDKGLHYDLVKNVTPPWPGFREQAVEAVEKVFVARAERRR
ARGKAHDATIRHIAVREGEQRVYERRKVAELKLADLDRVKDAERNARLIEKLRNWIEAGSPKDD
PPLSPKGDPIFKVRLVTKSKVNIALDTGNPKRPGTVDRGEMARVDVFRKASKKGKYEYYLVPIY
PHDIATMKTPPIRAVQAYKPEDEWPEMDSSYEFCWSLVPMTYLQVISSKGEIFEGYYRGMNRSV
GAIQLSAHSNSSDVVQGIGARTLTEFKKFNVDRFGRKHEVERELRTWRGETWRGKAYI
SEQ ID NO: 349
MGNYYLGLDVGIGSIGWAVINIEKKRIEDFNVRIFKSGEIQEKNRNSRASQQCRRSRGLRRLYR
RKSHRKLRLKNYLSIIGLTTSEKIDYYYETADNNVIQLRNKGLSEKLTPEEIAACLIHICNNRG
YKDFYEVNVEDIEDPDERNEYKEEHDSIVLISNLMNEGGYCTPAEMICNCREFDEPNSVYRKFH
NSAASKNHYLITRHMLVKEVDLILENQSKYYGILDDKTIAKIKDIIFAQRDFEIGPGKNERFRR
FTGYLDSIGKCQFFKDQERGSRFTVIADIYAFVNVLSQYTYTNNRGESVFDTSFANDLINSALK
NGSMDKRELKAIAKSYHIDISDKNSDTSLTKCFKYIKVVKPLFEKYGYDWDKLIENYTDTDNNV
LNRIGIVLSQAQTPKRRREKLKALNIGLDDGLINELTKLKLSGTANVSYKYMQGSIEAFCEGDL
YGKYQAKFNKEIPDIDENAKPQKLPPFKNEDDCEFFKNPVVFRSINETRKLINAIIDKYGYPAA
VNIETADELNKTFEDRAIDTKRNNDNQKENDRIVKEIIECIKCDEVHARHLIEKYKLWEAQEGK
CLYSGETITKEDMLRDKDKLFEVDHIVPYSLILDNTINNKALVYAEENQKKGQRTPLMYMNEAQ
AADYRVRVNTMFKSKKCSKKKYQYLMLPDLNDQELLGGWRSRNLNDTRYICKYLVNYLRKNLRF
DRSYESSDEDDLKIRDHYRVFPVKSRFTSMFRRWWLNEKTWGRYDKAELKKLTYLDHAADAIII
ANCRPEYVVLAGEKLKLNKMYHQAGKRITPEYEQSKKACIDNLYKLFRMDRRTAEKLLSGHGRL
TPIIPNLSEEVDKRLWDKNIYEQFWKDDKDKKSCEELYRENVASLYKGDPKFASSLSMPVISLK
PDHKYRGTITGEEAIRVKEIDGKLIKLKRKSISEITAESINSIYTDDKILIDSLKTIFEQADYK
DVGDYLKKTNQHFFTTSSGKRVNKVTVIEKVPSRWLRKEIDDNNFSLLNDSSYYCIELYKDSKG
DNNLQGIAMSDIVHDRKTKKLYLKPDFNYPDDYYTHVMYIFPGDYLRIKSTSKKSGEQLKFEGY
FISVKNVNENSFRFISDNKPCAKDKRVSITKKDIVIKLAVDLMGKVQGENNGKGISCGEPLSLL
KEKN
SEQ ID NO: 350
MLSRQLLGASHLARPVSYSYNVQDNDVHCSYGERCFMRGKRYRIGIDVGLNSVGLAAVEVSDEN
SPVRLLNAQSVIHDGGVDPQKNKEAITRKNMSGVARRTRRMRRRKRERLHKLDMLLGKFGYPVI
EPESLDKPFEEWHVRAELATRYIEDDELRRESISIALRHMARHRGWRNPYRQVDSLISDNPYSK
QYGELKEKAKAYNDDATAAEEESTPAQLVVAMLDAGYAEAPRLRWRTGSKKPDAEGYLPVRLMQ
EDNANELKQIFRVQRVPADEWKPLFRSVFYAVSPKGSAEQRVGQDPLAPEQARALKASLAFQEY
RIANVITNLRIKDASAELRKLTVDEKQSIYDQLVSPSSEDITWSDLCDFLGFKRSQLKGVGSLT
EDGEERISSRPPRLTSVQRIYESDNKIRKPLVAWWKSASDNEHEAMIRLLSNTVDIDKVREDVA
YASAIEFIDGLDDDALTKLDSVDLPSGRAAYSVETLQKLTRQMLTTDDDLHEARKTLFNVTDSW
RPPADPIGEPLGNPSVDRVLKNVNRYLMNCQQRWGNPVSVNIEHVRSSFSSVAFARKDKREYEK
NNEKRSIFRSSLSEQLRADEQMEKVRESDLRRLEAIQRQNGQCLYCGRTITFRTCEMDHIVPRK
GVGSTNTRTNFAAVCAECNRMKSNTPFAIWARSEDAQTRGVSLAEAKKRVTMFTFNPKSYAPRE
VKAFKQAVIARLQQTEDDAAIDNRSIESVAWMADELHRRIDWYFNAKQYVNSASIDDAEAETMK
TTVSVFQGRVTASARRAAGIEGKIHFIGQQSKTRLDRRHHAVDASVIAMMNTAAAQTLMERESL
RESQRLIGLMPGERSWKEYPYEGTSRYESFHLWLDNMDVLLELLNDALDNDRIAVMQSQRYVLG
NSIAHDATIHPLEKVPLGSAMSADLIRRASTPALWCALTRLPDYDEKEGLPEDSHREIRVHDTR
YSADDEMGFFASQAAQIAVQEGSADIGSAIHHARVYRCWKTNAKGVRKYFYGMIRVFQTDLLRA
CHDDLFTVPLPPQSISMRYGEPRVVQALQSGNAQYLGSLVVGDEIEMDFSSLDVDGQIGEYLQF
FSQFSGGNLAWKHWVVDGFFNQTQLRIRPRYLAAEGLAKAFSDDVVPDGVQKIVTKQGWLPPVN
TASKTAVRIVRRNAFGEPRLSSAHHMPCSWQWRHE
SEQ ID NO: 351
MYSIGLDLGISSVGWSVIDERTGNVIDLGVRLFSAKNSEKNLERRTNRGGRRLIRRKTNRLKDA
KKILAAVGFYEDKSLKNSCPYQLRVKGLTEPLSRGEIYKVTLHILKKRGISYLDEVDTEAAKES
QDYKEQVRKNAQLLTKYTPGQIQLQRLKENNRVKTGINAQGNYQLNVFKVSAYANELATILKTQ
QAFYPNELTDDWIALFVQPGIAEEAGLIYRKRPYYHGPGNEANNSPYGRWSDFQKTGEPATNIF
DKLIGKDFQGELRASGLSLSAQQYNLLNDLTNLKIDGEVPLSSEQKEYILTELMTKEFTRFGVN
DVVKLLGVKKERLSGWRLDKKGKPEIHTLKGYRNWRKIFAEAGIDLATLPTETIDCLAKVLTLN
TEREGIENTLAFELPELSESVKLLVLDRYKELSQSISTQSWHRFSLKTLHLLIPELMNATSEQN
TLLEQFQLKSDVRKRYSEYKKLPTKDVLAEIYNPTVNKTVSQAFKVIDALLVKYGKEQIRYITI
EMPRDDNEEDEKKRIKELHAKNSQRKNDSQSYFMQKSGWSQEKFQTTIQKNRRFLAKLLYYYEQ
DGICAYTGLPISPELLVSDSTEIDHIIPISISLDDSINNKVLVLSKANQVKGQQTPYDAWMDGS
FKKINGKFSNWDDYQKWVESRHFSHKKENNLLETRNIFDSEQVEKFLARNLNDTRYASRLVLNT
LQSFFTNQETKVRVVNGSFTHTLRKKWGADLDKTRETHHHHAVDATLCAVTSFVKVSRYHYAVK
EETGEKVMREIDFETGEIVNEMSYWEFKKSKKYERKTYQVKWPNFREQLKPVNLHPRIKFSHQV
DRKANRKLSDATIYSVREKTEVKTLKSGKQKITTDEYTIGKIKDIYTLDGWEAFKKKQDKLLMK
DLDEKTYERLLSIAETTPDFQEVEEKNGKVKRVKRSPFAVYCEENDIPAIQKYAKKNNGPLIRS
LKYYDGKLNKHINITKDSQGRPVEKTKNGRKVTLQSLKPYRYDIYQDLETKAYYTVQLYYSDLR
FVEGKYGITEKEYMKKVAEQTKGQVVRFCFSLQKNDGLEIEWKDSQRYDVRFYNFQSANSINFK
GLEQEMMPAENQFKQKPYNNGAINLNIAKYGKEGKKLRKFNTDILGKKHYLFYEKEPKNIIK
SEQ ID NO: 352
MYFYKNKENKLNKKVVLGLDLGIASVGWCLTDISQKEDNKFPIILHGVRLFETVDDSDDKLLNE
TRRKKRGQRRRNRRLFTRKRDFIKYLIDNNIIELEFDKNPKILVRNFIEKYINPFSKNLELKYK
SVTNLPIGFHNLRKAAINEKYKLDKSELIVLLYFYLSLRGAFFDNPEDTKSKEMNKNEIEIFDK
NESIKNAEFPIDKIIEFYKISGKIRSTINLKFGHQDYLKEIKQVFEKQNIDFMNYEKFAMEEKS
FFSRIRNYSEGPGNEKSFSKYGLYANENGNPELIINEKGQKIYTKIFKTLWESKIGKCSYDKKL
YRAPKNSFSAKVFDITNKLTDWKHKNEYISERLKRKILLSRFLNKDSKSAVEKILKEENIKFEN
LSEIAYNKDDNKINLPIINAYHSLTTIFKKHLINFENYLISNENDLSKLMSFYKQQSEKLFVPN
EKGSYEINQNNNVLHIFDAISNILNKFSTIQDRIRILEGYFEFSNLKKDVKSSEIYSEIAKLRE
FSGTSSLSFGAYYKFIPNLISEGSKNYSTISYEEKALQNQKNNFSHSNLFEKTWVEDLIASPTV
KRSLRQTMNLLKEIFKYSEKNNLEIEKIVVEVTRSSNNKHERKKIEGINKYRKEKYEELKKVYD
LPNENTTLLKKLWLLRQQQGYDAYSLRKIEANDVINKPWNYDIDHIVPRSISFDDSFSNLVIVN
KLDNAKKSNDLSAKQFIEKIYGIEKLKEAKENWGNWYLRNANGKAFNDKGKFIKLYTIDNLDEF
DNSDFINRNLSDTSYITNALVNHLTFSNSKYKYSVVSVNGKQTSNLRNQIAFVGIKNNKETERE
WKRPEGFKSINSNDFLIREEGKNDVKDDVLIKDRSFNGHHAEDAYFITIISQYFRSFKRIERLN
VNYRKETRELDDLEKNNIKFKEKASFDNFLLINALDELNEKLNQMRFSRMVITKKNTQLFNETL
YSGKYDKGKNTIKKVEKLNLLDNRTDKIKKIEEFFDEDKLKENELTKLHIFNHDKNLYETLKII
WNEVKIEIKNKNLNEKNYFKYFVNKKLQEGKISFNEWVPILDNDFKIIRKIRYIKFSSEEKETD
EIIFSQSNFLKIDQRQNFSFHNTLYWVQIWVYKNQKDQYCFISIDARNSKFEKDEIKINYEKLK
TQKEKLQIINEEPILKINKGDLFENEEKELFYIVGRDEKPQKLEIKYILGKKIKDQKQIQKPVK
KYFPNWKKVNLTYMGEIFKK
SEQ ID NO: 353
MDNKNYRIGIDVGLNSIGFCAVEVDQHDTPLGFLNLSVYRHDAGIDPNGKKTNTTRLAMSGVAR
RTRRLFRKRKRRLAALDRFIEAQGWTLPDHADYKDPYTPWLVRAELAQTPIRDENDLHEKLAIA
VRHIARHRGWRSPWVPVRSLHVEQPPSDQYLALKERVEAKTLLQMPEGATPAEMVVALDLSVDV
NLRPKNREKTDTRPENKKPGFLGGKLMQSDNANELRKIAKIQGLDDALLRELIELVFAADSPKG
ASGELVGYDVLPGQHGKRRAEKAHPAFQRYRIASIVSNLRIRHLGSGADERLDVETQKRVFEYL
LNAKPTADITWSDVAEEIGVERNLLMGTATQTADGERASAKPPVDVTNVAFATCKIKPLKEWWL
NADYEARCVMVSALSHAEKLTEGTAAEVEVAEFLQNLSDEDNEKLDSFSLPIGRAAYSVDSLER
LTKRMIENGEDLFEARVNEFGVSEDWRPPAEPIGARVGNPAVDRVLKAVNRYLMAAEAEWGAPL
SVNIEHVREGFISKRQAVEIDRENQKRYQRNQAVRSQIADHINATSGVRGSDVTRYLAIQRQNG
ECLYCGTAITFVNSEMDHIVPRAGLGSTNTRDNLVATCERCNKSKSNKPFAVWAAECGIPGVSV
AEALKRVDFWIADGFASSKEHRELQKGVKDRLKRKVSDPEIDNRSMESVAWMARELAHRVQYYF
DEKHTGTKVRVFRGSLTSAARKASGFESRVNFIGGNGKTRLDRRHHAMDAATVAMLRNSVAKTL
VLRGNIRASERAIGAAETWKSFRGENVADRQIFESWSENMRVLVEKFNLALYNDEVSIFSSLRL
QLGNGKAHDDTITKLQMHKVGDAWSLTEIDRASTPALWCALTRQPDFTWKDGLPANEDRTIIVN
GTHYGPLDKVGIFGKAAASLLVRGGSVDIGSAIHHARIYRIAGKKPTYGMVRVFAPDLLRYRNE
DLFNVELPPQSVSMRYAEPKVREAIREGKAEYLGWLVVGDELLLDLSSETSGQIAELQQDFPGT
THWTVAGFFSPSRLRLRPVYLAQEGLGEDVSEGSKSIIAGQGWRPAVNKVFGSAMPEVIRRDGL
GRKRRFSYSGLPVSWQG
SEQ ID NO: 354
MRLGLDIGTSSIGWWLYETDGAGSDARITGVVDGGVRIFSDGRDPKSGASLAVDRRAARAMRRR
RDRYLRRRATLMKVLAETGLMPADPAEAKALEALDPFALRAAGLDEPLPLPHLGRALFHLNQRR
GFKSNRKTDRGDNESGKIKDATARLDMEMMANGARTYGEFLHKRRQKATDPRHVPSVRTRLSIA
NRGGPDGKEEAGYDFYPDRRHLEEEFHKLWAAQGAHHPELTETLRDLLFEKIFFQRPLKEPEVG
LCLFSGHHGVPPKDPRLPKAHPLTQRRVLYETVNQLRVTADGREARPLTREERDQVIHALDNKK
PTKSLSSMVLKLPALAKVLKLRDGERFTLETGVRDAIACDPLRASPAHPDRFGPRWSILDADAQ
WEVISRIRRVQSDAEHAALVDWLTEAHGLDRAHAEATAHAPLPDGYGRLGLTATTRILYQLTAD
VVTYADAVKACGWHHSDGRTGECFDRLPYYGEVLERHVIPGSYHPDDDDITRFGRITNPTVHIG
LNQLRRLVNRIIETHGKPHQIVVELARDLKKSEEQKRADIKRIRDTTEAAKKRSEKLEELEIED
NGRNRMLLRLWEDLNPDDAMRRFCPYTGTRISAAMIFDGSCDVDHILPYSRTLDDSFPNRTLCL
REANRQKRNQTPWQAWGDTPHWHAIAANLKNLPENKRWRFAPDAMTRFEGENGFLDRALKDTQY
LARISRSYLDTLFTKGGHVWVVPGRFTEMLRRHWGLNSLLSDAGRGAVKAKNRTDHRHHAIDAA
VIAATDPGLLNRISRAAGQGEAAGQSAELIARDTPPPWEGFRDDLRVRLDRIIVSHRADHGRID
HAARKQGRDSTAGQLHQETAYSIVDDIHVASRTDLLSLKPAQLLDEPGRSGQVRDPQLRKALRV
ATGGKTGKDFENALRYFASKPGPYQAIRRVRIIKPLQAQARVPVPAQDPIKAYQGGSNHLFEIW
RLPDGEIEAQVITSFEAHTLEGEKRPHPAAKRLLRVHKGDMVALERDGRRVVGHVQKMDIANGL
FIVPHNEANADTRNNDKSDPFKWIQIGARPAIASGIRRVSVDEIGRLRDGGTRPI
SEQ ID NO: 355
MLHCIAVIRVPPSEEPGFFETHADSCALCHHGCMTYAANDKAIRYRVGIDVGLRSIGFCAVEVD
DEDHPIRILNSVVHVHDAGTGGPGETESLRKRSGVAARARRRGRAEKQRLKKLDVLLEELGWGV
SSNELLDSHAPWHIRKRLVSEYIEDETERRQCLSVAMAHIARHRGWRNSFSKVDTLLLEQAPSD
RMQGLKERVEDRTGLQFSEEVTQGELVATLLEHDGDVTIRGFVRKGGKATKVHGVLEGKYMQSD
LVAELRQICRTQRVSETTFEKLVLSIFHSKEPAPSAARQRERVGLDELQLALDPAAKQPRAERA
HPAFQKFKVVATLANMRIREQSAGERSLTSEELNRVARYLLNHTESESPTWDDVARKLEVPRHR
LRGSSRASLETGGGLTYPPVDDTTVRVMSAEVDWLADWWDCANDESRGHMIDAISNGCGSEPDD
VEDEEVNELISSATAEDMLKLELLAKKLPSGRVAYSLKTLREVTAAILETGDDLSQAITRLYGV
DPGWVPTPAPIEAPVGNPSVDRVLKQVARWLKFASKRWGVPQTVNIEHTREGLKSASLLEEERE
RWERFEARREIRQKEMYKRLGISGPFRRSDQVRYEILDLQDCACLYCGNEINFQTFEVDHIIPR
VDASSDSRRTNLAAVCHSCNSAKGGLAFGQWVKRGDCPSGVSLENAIKRVRSWSKDRLGLTEKA
MGKRKSEVISRLKTEMPYEEFDGRSMESVAWMAIELKKRIEGYFNSDRPEGCAAVQVNAYSGRL
TACARRAAHVDKRVRLIRLKGDDGHHKNRFDRRNHAMDALVIALMTPAIARTIAVREDRREAQQ
LTRAFESWKNFLGSEERMQDRWESWIGDVEYACDRLNELIDADKIPVTENLRLRNSGKLHADQP
ESLKKARRGSKRPRPQRYVLGDALPADVINRVTDPGLWTALVRAPGFDSQLGLPADLNRGLKLR
GKRISADFPIDYFPTDSPALAVQGGYVGLEFHHARLYRIIGPKEKVKYALLRVCAIDLCGIDCD
DLFEVELKPSSISMRTADAKLKEAMGNGSAKQIGWLVLGDEIQIDPTKFPKQSIGKFLKECGPV
SSWRVSALDTPSKITLKPRLLSNEPLLKTSRVGGHESDLVVAECVEKIMKKTGWVVEINALCQS
GLIRVIRRNALGEVRTSPKSGLPISLNLR
SEQ ID NO: 356
MRYRVGLDLGTASVGAAVFSMDEQGNPMELIWHYERLFSEPLVPDMGQLKPKKAARRLARQQRR
QIDRRASRLRRIAIVSRRLGIAPGRNDSGVHGNDVPTLRAMAVNERIELGQLRAVLLRMGKKRG
YGGTFKAVRKVGEAGEVASGASRLEEEMVALASVQNKDSVTVGEYLAARVEHGLPSKLKVAANN
EYYAPEYALFRQYLGLPAIKGRPDCLPNMYALRHQIEHEFERIWATQSQFHDVMKDHGVKEEIR
NAIFFQRPLKSPADKVGRCSLQTNLPRAPRAQIAAQNFRIEKQMADLRWGMGRRAEMLNDHQKA
VIRELLNQQKELSFRKIYKELERAGCPGPEGKGLNMDRAALGGRDDLSGNTTLAAWRKLGLEDR
WQELDEVTQIQVINFLADLGSPEQLDTDDWSCRFMGKNGRPRNFSDEFVAFMNELRMTDGFDRL
SKMGFEGGRSSYSIKALKALTEWMIAPHWRETPETHRVDEEAAIRECYPESLATPAQGGRQSKL
EPPPLTGNEVVDVALRQVRHTINMMIDDLGSVPAQIVVEMAREMKGGVTRRNDIEKQNKRFASE
RKKAAQSIEENGKTPTPARILRYQLWIEQGHQCPYCESNISLEQALSGAYTNFEHILPRTLTQI
GRKRSELVLAHRECNDEKGNRTPYQAFGHDDRRWRIVEQRANALPKKSSRKTRLLLLKDFEGEA
LTDESIDEFADRQLHESSWLAKVTTQWLSSLGSDVYVSRGSLTAELRRRWGLDTVIPQVRFESG
MPVVDEEGAEITPEEFEKFRLQWEGHRVTREMRTDRRPDKRIDHRHHLVDAIVTALTSRSLYQQ
YAKAWKVADEKQRHGRVDVKVELPMPILTIRDIALEAVRSVRISHKPDRYPDGRFFEATAYGIA
QRLDERSGEKVDWLVSRKSLTDLAPEKKSIDVDKVRANISRIVGEAIRLHISNIFEKRVSKGMT
PQQALREPIEFQGNILRKVRCFYSKADDCVRIEHSSRRGHHYKMLLNDGFAYMEVPCKEGILYG
VPNLVRPSEAVGIKRAPESGDFIRFYKGDTVKNIKTGRVYTIKQILGDGGGKLILTPVTETKPA
DLLSAKWGRLKVGGRNIHLLRLCAE
SEQ ID NO: 357
MIGEHVRGGCLFDDHWTPNWGAFRLPNTVRTFTKAENPKDGSSLAEPRRQARGLRRRLRRKTQR
LEDLRRLLAKEGVLSLSDLETLFRETPAKDPYQLRAEGLDRPLSFPEWVRVLYHITKHRGFQSN
RRNPVEDGQERSRQEEEGKLLSGVGENERLLREGGYRTAGEMLARDPKFQDHRRNRAGDYSHTL
SRSLLLEEARRLFQSQRTLGNPHASSNLEEAFLHLVAFQNPFASGEDIRNKAGHCSLEPDQIRA
PRRSASAETFMLLQKTGNLRLIHRRTGEERPLTDKEREQIHLLAWKQEKVTHKTLRRHLEIPEE
WLFTGLPYHRSGDKAEEKLFVHLAGIHEIRKALDKGPDPAVWDTLRSRRDLLDSIADTLTFYKN
EDEILPRLESLGLSPENARALAPLSFSGTAHLSLSALGKLLPHLEEGKSYTQARADAGYAAPPP
DRHPKLPPLEEADWRNPVVFRALTQTRKVVNALVRRYGPPWCIHLETARELSQPAKVRRRIETE
QQANEKKKQQAEREFLDIVGTAPGPGDLLKMRLWREQGGFCPYCEEYLNPTRLAEPGYAEMDHI
LPYSRSLDNGWHNRVLVHGKDNRDKGNRTPFEAFGGDTARWDRLVAWVQASHLSAPKKRNLLRE
DFGEEAERELKDRNLTDTRFITKTAATLLRDRLTFHPEAPKDPVMTLNGRLTAFLRKQWGLHKN
RKNGDLHHALDAAVLAVASRSFVYRLSSHNAAWGELPRGREAENGFSLPYPAFRSEVLARLCPT
REEILLRLDQGGVGYDEAFRNGLRPVFVSRAPSRRLRGKAHMETLRSPKWKDHPEGPRTASRIP
LKDLNLEKLERMVGKDRDRKLYEALRERLAAFGGNGKKAFVAPFRKPCRSGEGPLVRSLRIFDS
GYSGVELRDGGEVYAVADHESMVRVDVYAKKNRFYLVPVYVADVARGIVKNRAIVAHKSEEEWD
LVDGSFDFRFSLFPGDLVEIEKKDGAYLGYYKSCHRGDGRLLLDRHDRMPRESDCGTFYVSTRK
DVLSMSKYQVDPLGEIRLVGSEKPPFVL
SEQ ID NO: 358
MEKKRKVTLGFDLGIASVGWAIVDSETNQVYKLGSRLFDAPDTNLERRTQRGTRRLLRRRKYRN
QKFYNLVKRTEVFGLSSREAIENRFRELSIKYPNIIELKTKALSQEVCPDEIAWILHDYLKNRG
YFYDEKETKEDFDQQTVESMPSYKLNEFYKKYGYFKGALSQPTESEMKDNKDLKEAFFFDFSNK
EWLKEINYFFNVQKNILSETFIEEFKKIFSFTRDISKGPGSDNMPSPYGIFGEFGDNGQGGRYE
HIWDKNIGKCSIFTNEQRAPKYLPSALIFNFLNELANIRLYSTDKKNIQPLWKLSSVDKLNILL
NLFNLPISEKKKKLTSTNINDIVKKESIKSIMISVEDIDMIKDEWAGKEPNVYGVGLSGLNIEE
SAKENKFKFQDLKILNVLINLLDNVGIKFEFKDRNDIIKNLELLDNLYLFLIYQKESNNKDSSI
DLFIAKNESLNIENLKLKLKEFLLGAGNEFENHNSKTHSLSKKAIDEILPKLLDNNEGWNLEAI
KNYDEEIKSQIEDNSSLMAKQDKKYLNDNFLKDAILPPNVKVTFQQAILIFNKIIQKFSKDFEI
DKVVIELAREMTQDQENDALKGIAKAQKSKKSLVEERLEANNIDKSVFNDKYEKLIYKIFLWIS
QDFKDPYTGAQISVNEIVNNKVEIDHIIPYSLCFDDSSANKVLVHKQSNQEKSNSLPYEYIKQG
HSGWNWDEFTKYVKRVFVNNVDSILSKKERLKKSENLLTASYDGYDKLGFLARNLNDTRYATIL
FRDQLNNYAEHHLIDNKKMFKVIAMNGAVTSFIRKNMSYDNKLRLKDRSDFSHHAYDAAIIALF
SNKTKTLYNLIDPSLNGIISKRSEGYWVIEDRYTGEIKELKKEDWTSIKNNVQARKIAKEIEEY
LIDLDDEVFFSRKTKRKTNRQLYNETIYGIATKTDEDGITNYYKKEKFSILDDKDIYLRLLRER
EKFVINQSNPEVIDQIIEIIESYGKENNIPSRDEAINIKYTKNKINYNLYLKQYMRSLTKSLDQ
FSEEFINQMIANKTFVLYNPTKNTTRKIKFLRLVNDVKINDIRKNQVINKFNGKNNEPKAFYEN
INSLGAIVFKNSANNFKTLSINTQIAIFGDKNWDIEDFKTYNMEKIEKYKEIYGIDKTYNFHSF
IFPGTILLDKQNKEFYYISSIQTVRDIIEIKFLNKIEFKDENKNQDTSKTPKRLMFGIKSIMNN
YEQVDISPFGINKKIFE
SEQ ID NO: 359
MGYRIGLDVGITSTGYAVLKTDKNGLPYKILTLDSVIYPRAENPQTGASLAEPRRIKRGLRRRT
RRTKFRKQRTQQLFIHSGLLSKPEIEQILATPQAKYSVYELRVAGLDRRLTNSELFRVLYFFIG
HRGFKSNRKAELNPENEADKKQMGQLLNSIEEIRKAIAEKGYRTVGELYLKDPKYNDHKRNKGY
IDGYLSTPNRQMLVDEIKQILDKQRELGNEKLTDEFYATYLLGDENRAGIFQAQRDFDEGPGAG
PYAGDQIKKMVGKDIFEPTEDRAAKATYTFQYFNLLQKMTSLNYQNTTGDTWHTLNGLDRQAII
DAVFAKAEKPTKTYKPTDFGELRKLLKLPDDARFNLVNYGSLQTQKEIETVEKKTRFVDFKAYH
DLVKVLPEEMWQSRQLLDHIGTALTLYSSDKRRRRYFAEELNLPAELIEKLLPLNFSKFGHLSI
KSMQNIIPYLEMGQVYSEATTNTGYDFRKKQISKDTIREEITNPVVRRAVTKTIKIVEQIIRRY
GKPDGINIELARELGRNFKERGDIQKRQDKNRQTNDKIAAELTELGIPVNGQNIIRYKLHKEQN
GVDPYTGDQIPFERAFSEGYEVDHIIPYSISWDDSYTNKVLTSAKCNREKGNRIPMVYLANNEQ
RLNALTNIADNIIRNSRKRQKLLKQKLSDEELKDWKQRNINDTRFITRVLYNYFRQAIEFNPEL
EKKQRVLPLNGEVTSKIRSRWGFLKVREDGDLHHAIDATVIAAITPKFIQQVTKYSQHQEVKNN
QALWHDAEIKDAEYAAEAQRMDADLFNKIFNGFPLPWPEFLDELLARISDNPVEMMKSRSWNTY
TPIEIAKLKPVFVVRLANHKISGPAHLDTIRSAKLFDEKGIVLSRVSITKLKINKKGQVATGDG
IYDPENSNNGDKVVYSAIRQALEAHNGSGELAFPDGYLEYVDHGTKKLVRKVRVAKKVSLPVRL
KNKAAADNGSMVRIDVFNTGKKFVFVPIYIKDTVEQVLPNKAIARGKSLWYQITESDQFCFSLY
PGDMVHIESKTGIKPKYSNKENNTSVVPIKNFYGYFDGADIATASILVRAHDSSYTARSIGIAG
LLKFEKYQVDYFGRYHKVHEKKRQLFVKRDE
SEQ ID NO: 360
MQKNINTKQNHIYIKQAQKIKEKLGDKPYRIGLDLGVGSIGFAIVSMEENDGNVLLPKEIIMVG
SRIFKASAGAADRKLSRGQRNNHRHTRERMRYLWKVLAEQKLALPVPADLDRKENSSEGETSAK
RFLGDVLQKDIYELRVKSLDERLSLQELGYVLYHIAGHRGSSAIRTFENDSEEAQKENTENKKI
AGNIKRLMAKKNYRTYGEYLYKEFFENKEKHKREKISNAANNHKFSPTRDLVIKEAEAILKKQA
GKDGFHKELTEEYIEKLTKAIGYESEKLIPESGFCPYLKDEKRLPASHKLNEERRLWETLNNAR
YSDPIVDIVTGEITGYYEKQFTKEQKQKLFDYLLTGSELTPAQTKKLLGLKNTNFEDIILQGRD
KKAQKIKGYKLIKLESMPFWARLSEAQQDSFLYDWNSCPDEKLLTEKLSNEYHLTEEEIDNAFN
EIVLSSSYAPLGKSAMLIILEKIKNDLSYTEAVEEALKEGKLTKEKQAIKDRLPYYGAVLQEST
QKIIAKGFSPQFKDKGYKTPHTNKYELEYGRIANPVVHQTLNELRKLVNEIIDILGKKPCEIGL
ETARELKKSAEDRSKLSREQNDNESNRNRIYEIYIRPQQQVIITRRENPRNYILKFELLEEQKS
QCPFCGGQISPNDIINNQADIEHLFPIAESEDNGRNNLVISHSACNADKAKRSPWAAFASAAKD
SKYDYNRILSNVKENIPHKAWRFNQGAFEKFIENKPMAARFKTDNSYISKVAHKYLACLFEKPN
IICVKGSLTAQLRMAWGLQGLMIPFAKQLITEKESESFNKDVNSNKKIRLDNRHHALDAIVIAY
ASRGYGNLLNKMAGKDYKINYSERNWLSKILLPPNNIVWENIDADLESFESSVKTALKNAFISV
KHDHSDNGELVKGTMYKIFYSERGYTLTTYKKLSALKLTDPQKKKTPKDFLETALLKFKGRESE
MKNEKIKSAIENNKRLFDVIQDNLEKAKKLLEEENEKSKAEGKKEKNINDASIYQKAISLSGDK
YVQLSKKEPGKFFAISKPTPTTTGYGYDTGDSLCVDLYYDNKGKLCGEIIRKIDAQQKNPLKYK
EQGFTLFERIYGGDILEVDFDIHSDKNSFRNNTGSAPENRVFIKVGTFTEITNNNIQIWFGNII
KSTGGQDDSFTINSMQQYNPRKLILSSCGFIKYRSPILKNKEG
SEQ ID NO: 361
MAAFKPNPINYILGLDIGIASVGWAMVEIDEDENPICLIDLGVRVFERAEVPKTGDSLAMARRL
ARSVRRLTRRRAHRLLRARRLLKREGVLQAADFDENGLIKSLPNTPWQLRAAALDRKLTPLEWS
AVLLHLIKHRGYLSQRKNEGETADKELGALLKGVADNAHALQTGDFRTPAELALNKFEKESGHI
RNQRGDYSHTFSRKDLQAELILLFEKQKEFGNPHVSGGLKEGIETLLMTQRPALSGDAVQKMLG
HCTFEPAEPKAAKNTYTAERFIWLTKLNNLRILEQGSERPLTDTERATLMDEPYRKSKLTYAQA
RKLLGLEDTAFFKGLRYGKDNAEASTLMEMKAYHAISRALEKEGLKDKKSPLNLSPELQDEIGT
AFSLFKTDEDITGRLKDRIQPEILEALLKHISFDKFVQISLKALRRIVPLMEQGKRYDEACAEI
YGDHYGKKNTEEKIYLPPIPADEIRNPVVLRALSQARKVINGVVRRYGSPARIHIETAREVGKS
FKDRKEIEKRQEENRKDREKAAAKFREYFPNFVGEPKSKDILKLRLYEQQHGKCLYSGKEINLG
RLNEKGYVEIDHALPFSRTWDDSFNNKVLVLGSENQNKGNQTPYEYFNGKDNSREWQEFKARVE
TSRFPRSKKQRILLQKFDEDGFKERNLNDTRYVNRFLCQFVADRMRLTGKGKKRVFASNGQITN
LLRGFWGLRKVRAENDRHHALDAVVVACSTVAMQQKITRFVRYKEMNAFDGKTIDKETGEVLHQ
KTHFPQPWEFFAQEVMIRVFGKPDGKPEFEEADTPEKLRTLLAEKLSSRPEAVHEYVTPLFVSR
APNRKMSGQGHMETVKSAKRLDEGVSVLRVPLTQLKLKDLEKMVNREREPKLYEALKARLEAHK
DDPAKAFAEPFYKYDKAGNRTQQVKAVRVEQVQKTGVWVRNHNGIADNATMVRVDVFEKGDKYY
LVPIYSWQVAKGILPDRAVVQGKDEEDWQLIDDSFNFKFSLHPNDLVEVITKKARMFGYFASCH
RGTGNINIRIHDLDHKIGKNGILEGIGVKTALSFQKYQIDELGKEIRPCRLKKRPPVR
SEQ ID NO: 362
MQTTNLSYILGLDLGIASVGWAVVEINENEDPIGLIDVGVRIFERAEVPKTGESLALSRRLARS
TRRLIRRRAHRLLLAKRFLKREGILSTIDLEKGLPNQAWELRVAGLERRLSAIEWGAVLLHLIK
HRGYLSKRKNESQTNNKELGALLSGVAQNHQLLQSDDYRTPAELALKKFAKEEGHIRNQRGAYT
HTFNRLDLLAELNLLFAQQHQFGNPHCKEHIQQYMTELLMWQKPALSGEAILKMLGKCTHEKNE
FKAAKHTYSAERFVWLTKLNNLRILEDGAERALNEEERQLLINHPYEKSKLTYAQVRKLLGLSE
QAIFKHLRYSKENAESATFMELKAWHAIRKALENQGLKDTWQDLAKKPDLLDEIGTAFSLYKTD
EDIQQYLTNKVPNSVINALLVSLNFDKFIELSLKSLRKILPLMEQGKRYDQACREIYGHHYGEA
NQKTSQLLPAIPAQEIRNPVVLRTLSQARKVINAIIRQYGSPARVHIETGRELGKSFKERREIQ
KQQEDNRTKRESAVQKFKELFSDFSSEPKSKDILKFRLYEQQHGKCLYSGKEINIHRLNEKGYV
EIDHALPFSRTWDDSFNNKVLVLASENQNKGNQTPYEWLQGKINSERWKNFVALVLGSQCSAAK
KQRLLTQVIDDNKFIDRNLNDTRYIARFLSNYIQENLLLVGKNKKNVFTPNGQITALLRSRWGL
IKARENNNRHHALDAIVVACATPSMQQKITRFIRFKEVHPYKIENRYEMVDQESGEIISPHFPE
PWAYFRQEVNIRVFDNHPDTVLKEMLPDRPQANHQFVQPLFVSRAPTRKMSGQGHMETIKSAKR
LAEGISVLRIPLTQLKPNLLENMVNKEREPALYAGLKARLAEFNQDPAKAFATPFYKQGGQQVK
AIRVEQVQKSGVLVRENNGVADNASIVRTDVFIKNNKFFLVPIYTWQVAKGILPNKAIVAHKNE
DEWEEMDEGAKFKFSLFPNDLVELKTKKEYFFGYYIGLDRATGNISLKEHDGEISKGKDGVYRV
GVKLALSFEKYQVDELGKNRQICRPQQRQPVR
SEQ ID NO: 363
MGIRFAFDLGTNSIGWAVWRTGPGVFGEDTAASLDGSGVLIFKDGRNPKDGQSLATMRRVPRQS
RKRRDRFVLRRRDLLAALRKAGLFPVDVEEGRRLAATDPYHLRAKALDESLTPHEMGRVIFHLN
QRRGFRSNRKADRQDREKGKIAEGSKRLAETLAATNCRTLGEFLWSRHRGTPRTRSPTRIRMEG
EGAKALYAFYPTREMVRAEFERLWTAQSRFAPDLLTPERHEEIAGILFRQRDLAPPKIGCCTFE
PSERRLPRALPSVEARGIYERLAHLRITTGPVSDRGLTRPERDVLASALLAGKSLTFKAVRKTL
KILPHALVNFEEAGEKGLDGALTAKLLSKPDHYGAAWHGLSFAEKDTFVGKLLDEADEERLIRR
LVTENRLSEDAARRCASIPLADGYGRLGRTANTEILAALVEETDETGTVVTYAEAVRRAGERTG
RNWHHSDERDGVILDRLPYYGEILQRHVVPGSGEPEEKNEAARWGRLANPTVHIGLNQLRKVVN
RLIAAHGRPDQIVVELARELKLNREQKERLDRENRKNREENERRTAILAEHGQRDTAENKIRLR
LFEEQARANAGIALCPYTGRAIGIAELFTSEVEIDHILPVSLTLDDSLANRVLCRREANREKRR
QTPFQAFGATPAWNDIVARAAKLPPNKRWRFDPAALERFEREGGFLGRQLNETKYLSRLAKIYL
GKICDPDRVYVTPGTLTGLLRARWGLNSILSDSNFKNRSDHRHHAVDAVVIGVLTRGMIQRIAH
DAARAEDQDLDRVFRDVPVPFEDFRDHVRERVSTITVAVKPEHGKGGALHEDTSYGLVPDTDPN
AALGNLVVRKPIRSLTAGEVDRVRDRALRARLGALAAPFRDESGRVRDAKGLAQALEAFGAENG
IRRVRILKPDASVVTIADRRTGVPYRAVAPGENHHVDIVQMRDGSWRGFAASVFEVNRPGWRPE
WEVKKLGGKLVMRLHKGDMVELSDKDGQRRVKVVQQIEISANRVRLSPHNDGGKLQDRHADADD
PFRWDLATIPLLKDRGCVAVRVDPIGVVTLRRSNV
SEQ ID NO: 364
MMEVFMGRLVLGLDIGITSVGFGIIDLDESEIVDYGVRLFKEGTAAENETRRTKRGGRRLKRRR
VTRREDMLHLLKQAGIISTSFHPLNNPYDVRVKGLNERLNGEELATALLHLCKHRGSSVETIED
DEAKAKEAGETKKVLSMNDQLLKSGKYVCEIQKERLRTNGHIRGHENNFKTRAYVDEAFQILSH
QDLSNELKSAIITIISRKRMYYDGPGGPLSPTPYGRYTYFGQKEPIDLIEKMRGKCSLFPNEPR
APKLAYSAELFNLLNDLNNLSIEGEKLTSEQKAMILKIVHEKGKITPKQLAKEVGVSLEQIRGF
RIDTKGSPLLSELTGYKMIREVLEKSNDEHLEDHVFYDEIAEILTKTKDIEGRKKQISELSSDL
NEESVHQLAGLTKFTAYHSLSFKALRLINEEMLKTELNQMQSITLFGLKQNNELSVKGMKNIQA
DDTAILSPVAKRAQRETFKVVNRLREIYGEFDSIVVEMAREKNSEEQRKAIRERQKFFEMRNKQ
VADIIGDDRKINAKLREKLVLYQEQDGKTAYSLEPIDLKLLIDDPNAYEVDHIIPISISLDDSI
TNKVLVTHRENQEKGNLTPISAFVKGRFTKGSLAQYKAYCLKLKEKNIKTNKGYRKKVEQYLLN
ENDIYKYDIQKEFINRNLVDTSYASRVVLNTLTTYFKQNEIPTKVFTVKGSLTNAFRRKINLKK
DRDEDYGHHAIDALIIASMPKMRLLSTIFSRYKIEDIYDESTGEVFSSGDDSMYYDDRYFAFIA
SLKAIKVRKFSHKIDTKPNRSVADETIYSTRVIDGKEKVVKKYKDIYDPKFTALAEDILNNAYQ
EKYLMALHDPQTFDQIVKVVNYYFEEMSKSEKYFTKDKKGRIKISGMNPLSLYRDEHGMLKKYS
KKGDGPAITQMKYFDGVLGNHIDISAHYQVRDKKVVLQQISPYRTDFYYSKENGYKFVTIRYKD
VRWSEKKKKYVIDQQDYAMKKAEKKIDDTYEFQFSMHRDELIGITKAEGEALIYPDETWHNFNF
FFHAGETPEILKFTATNNDKSNKIEVKPIHCYCKMRLMPTISKKIVRIDKYATDVVGNLYKVKK
NTLKFEFD
SEQ ID NO: 365
MKKILGVDLGITSFGYAILQETGKDLYRCLDNSVVMRNNPYDEKSGESSQSIRSTQKSMRRLIE
KRKKRIRCVAQTMERYGILDYSETMKINDPKNNPIKNRWQLRAVDAWKRPLSPQELFAIFAHMA
KHRGYKSIATEDLIYELELELGLNDPEKESEKKADERRQVYNALRHLEELRKKYGGETIAQTIH
RAVEAGDLRSYRNHDDYEKMIRREDIEEEIEKVLLRQAELGALGLPEEQVSELIDELKACITDQ
EMPTIDESLFGKCTFYKDELAAPAYSYLYDLYRLYKKLADLNIDGYEVTQEDREKVIEWVEKKI
AQGKNLKKITHKDLRKILGLAPEQKIFGVEDERIVKGKKEPRTFVPFFFLADIAKFKELFASIQ
KHPDALQIFRELAEILQRSKTPQEALDRLRALMAGKGIDTDDRELLELFKNKRSGTRELSHRYI
LEALPLFLEGYDEKEVQRILGFDDREDYSRYPKSLRHLHLREGNLFEKEENPINNHAVKSLASW
ALGLIADLSWRYGPFDEIILETTRDALPEKIRKEIDKAMREREKALDKIIGKYKKEFPSIDKRL
ARKIQLWERQKGLDLYSGKVINLSQLLDGSADIEHIVPQSLGGLSTDYNTIVTLKSVNAAKGNR
LPGDWLAGNPDYRERIGMLSEKGLIDWKKRKNLLAQSLDEIYTENTHSKGIRATSYLEALVAQV
LKRYYPFPDPELRKNGIGVRMIPGKVTSKTRSLLGIKSKSRETNFHHAEDALILSTLTRGWQNR
LHRMLRDNYGKSEAELKELWKKYMPHIEGLTLADYIDEAFRRFMSKGEESLFYRDMFDTIRSIS
YWVDKKPLSASSHKETVYSSRHEVPTLRKNILEAFDSLNVIKDRHKLTTEEFMKRYDKEIRQKL
WLHRIGNTNDESYRAVEERATQIAQILTRYQLMDAQNDKEIDEKFQQALKELITSPIEVTGKLL
RKMRFVYDKLNAMQIDRGLVETDKNMLGIHISKGPNEKLIFRRMDVNNAHELQKERSGILCYLN
EMLFIFNKKGLIHYGCLRSYLEKGQGSKYIALFNPRFPANPKAQPSKFTSDSKIKQVGIGSATG
IIKAHLDLDGHVRSYEVFGTLPEGSIEWFKEESGYGRVEDDPHH
SEQ ID NO: 366
MRPIEPWILGLDIGTDSLGWAVFSCEEKGPPTAKELLGGGVRLFDSGRDAKDHTSRQAERGAFR
RARRQTRTWPWRRDRLIALFQAAGLTPPAAETRQIALALRREAVSRPLAPDALWAALLHLAHHR
GFRSNRIDKRERAAAKALAKAKPAKATAKATAPAKEADDEAGFWEGAEAALRQRMAASGAPTVG
ALLADDLDRGQPVRMRYNQSDRDGVVAPTRALIAEELAEIVARQSSAYPGLDWPAVTRLVLDQR
PLRSKGAGPCAFLPGEDRALRALPTVQDFIIRQTLANLRLPSTSADEPRPLTDEEHAKALALLS
TARFVEWPALRRALGLKRGVKFTAETERNGAKQAARGTAGNLTEAILAPLIPGWSGWDLDRKDR
VFSDLWAARQDRSALLALIGDPRGPTRVTEDETAEAVADAIQIVLPTGRASLSAKAARAIAQAM
APGIGYDEAVTLALGLHHSHRPRQERLARLPYYAAALPDVGLDGDPVGPPPAEDDGAAAEAYYG
RIGNISVHIALNETRKIVNALLHRHGPILRLVMVETTRELKAGADERKRMIAEQAERERENAEI
DVELRKSDRWMANARERRQRVRLARRQNNLCPYTSTPIGHADLLGDAYDIDHVIPLARGGRDSL
DNMVLCQSDANKTKGDKTPWEAFHDKPGWIAQRDDFLARLDPQTAKALAWRFADDAGERVARKS
AEDEDQGFLPRQLTDTGYIARVALRYLSLVTNEPNAVVATNGRLTGLLRLAWDITPGPAPRDLL
PTPRDALRDDTAARRFLDGLTPPPLAKAVEGAVQARLAALGRSRVADAGLADALGLTLASLGGG
GKNRADHRHHFIDAAMIAVTTRGLINQINQASGAGRILDLRKWPRTNFEPPYPTFRAEVMKQWD
HIHPSIRPAHRDGGSLHAATVFGVRNRPDARVLVQRKPVEKLFLDANAKPLPADKIAEIIDGFA
SPRMAKRFKALLARYQAAHPEVPPALAALAVARDPAFGPRGMTANTVIAGRSDGDGEDAGLITP
FRANPKAAVRTMGNAVYEVWEIQVKGRPRWTHRVLTRFDRTQPAPPPPPENARLVMRLRRGDLV
YWPLESGDRLFLVKKMAVDGRLALWPARLATGKATALYAQLSCPNINLNGDQGYCVQSAEGIRK
EKIRTTSCTALGRLRLSKKAT
SEQ ID NO: 367
MKYTLGLDVGIASVGWAVIDKDNNKIIDLGVRCFDKAEESKTGESLATARRIARGMRRRISRRS
QRLRLVKKLFVQYEIIKDSSEFNRIFDTSRDGWKDPWELRYNALSRILKPYELVQVLTHITKRR
GFKSNRKEDLSTTKEGVVITSIKNNSEMLRTKNYRTIGEMIFMETPENSNKRNKVDEYIHTIAR
EDLLNEIKYIFSIQRKLGSPFVTEKLEHDFLNIWEFQRPFASGDSILSKVGKCTLLKEELRAPT
SCYTSEYFGLLQSINNLVLVEDNNTLTLNNDQRAKIIEYAHFKNEIKYSEIRKLLDIEPEILFK
AHNLTHKNPSGNNESKKFYEMKSYHKLKSTLPTDIWGKLHSNKESLDNLFYCLTVYKNDNEIKD
YLQANNLDYLIEYIAKLPTFNKFKHLSLVAMKRIIPFMEKGYKYSDACNMAELDFTGSSKLEKC
NKLTVEPIIENVTNPVVIRALTQARKVINAIIQKYGLPYMVNIELAREAGMTRQDRDNLKKEHE
NNRKAREKISDLIRQNGRVASGLDILKWRLWEDQGGRCAYSGKPIPVCDLLNDSLTQIDHIYPY
SRSMDDSYMNKVLVLTDENQNKRSYTPYEVWGSTEKWEDFEARIYSMHLPQSKEKRLLNRNFIT
KDLDSFISRNLNDTRYISRFLKNYIESYLQFSNDSPKSCVVCVNGQCTAQLRSRWGLNKNREES
DLHHALDAAVIACADRKIIKEITNYYNERENHNYKVKYPLPWHSFRQDLMETLAGVFISRAPRR
KITGPAHDETIRSPKHFNKGLTSVKIPLTTVTLEKLETMVKNTKGGISDKAVYNVLKNRLIEHN
NKPLKAFAEKIYKPLKNGTNGAIIRSIRVETPSYTGVFRNEGKGISDNSLMVRVDVFKKKDKYY
LVPIYVAHMIKKELPSKAIVPLKPESQWELIDSTHEFLFSLYQNDYLVIKTKKGITEGYYRSCH
RGTGSLSLMPHFANNKNVKIDIGVRTAISIEKYNVDILGNKSIVKGEPRRGMEKYNSFKSN
SEQ ID NO: 368
MIRTLGIDIGIASIGWAVIEGEYTDKGLENKEIVASGVRVFTKAENPKNKESLALPRTLARSAR
RRNARKKGRIQQVKHYLSKALGLDLECFVQGEKLATLFQTSKDFLSPWELRERALYRVLDKEEL
ARVILHIAKRRGYDDITYGVEDNDSGKIKKAIAENSKRIKEEQCKTIGEMMYKLYFQKSLNVRN
KKESYNRCVGRSELREELKTIFQIQQELKSPWVNEELIYKLLGNPDAQSKQEREGLIFYQRPLK
GFGDKIGKCSHIKKGENSPYRACKHAPSAEEFVALTKSINFLKNLTNRHGLCFSQEDMCVYLGK
ILQEAQKNEKGLTYSKLKLLLDLPSDFEFLGLDYSGKNPEKAVFLSLPSTFKLNKITQDRKTQD
KIANILGANKDWEAILKELESLQLSKEQIQTIKDAKLNFSKHINLSLEALYHLLPLMREGKRYD
EGVEILQERGIFSKPQPKNRQLLPPLSELAKEESYFDIPNPVLRRALSEFRKVVNALLEKYGGF
HYFHIELTRDVCKAKSARMQLEKINKKNKSENDAASQLLEVLGLPNTYNNRLKCKLWKQQEEYC
LYSGEKITIDHLKDQRALQIDHAFPLSRSLDDSQSNKVLCLTSSNQEKSNKTPYEWLGSDEKKW
DMYVGRVYSSNFSPSKKRKLTQKNFKERNEEDFLARNLVDTGYIGRVTKEYIKHSLSFLPLPDG
KKEHIRIISGSMTSTMRSFWGVQEKNRDHHLHHAQDAIIIACIEPSMIQKYTTYLKDKETHRLK
SHQKAQILREGDHKLSLRWPMSNFKDKIQESIQNIIPSHHVSHKVTGELHQETVRTKEFYYQAF
GGEEGVKKALKFGKIREINQGIVDNGAMVRVDIFKSKDKGKFYAVPIYTYDFAIGKLPNKAIVQ
GKKNGIIKDWLEMDENYEFCFSLFKNDCIKIQTKEMQEAVLAIYKSTNSAKATIELEHLSKYAL
KNEDEEKMFTDTDKEKNKTMTRESCGIQGLKVFQKVKLSVLGEVLEHKPRNRQNIALKTTPKHV
SEQ ID NO: 369
MKYSIGLDIGIASVGWSVINKDKERIEDMGVRIFQKAENPKDGSSLASSRREKRGSRRRNRRKK
HRLDRIKNILCESGLVKKNEIEKIYKNAYLKSPWELRAKSLEAKISNKEIAQILLHIAKRRGFK
SFRKTDRNADDTGKLLSGIQENKKIMEEKGYLTIGDMVAKDPKFNTHVRNKAGSYLFSFSRKLL
EDEVRKIQAKQKELGNTHFTDDVLEKYIEVFNSQRNFDEGPSKPSPYYSEIGQIAKMIGNCTFE
SSEKRTAKNTWSGERFVFLQKLNNFRIVGLSGKRPLTEEERDIVEKEVYLKKEVRYEKLRKILY
LKEEERFGDLNYSKDEKQDKKTEKTKFISLIGNYTIKKLNLSEKLKSEIEEDKSKLDKIIEILT
FNKSDKTIESNLKKLELSREDIEILLSEEFSGTLNLSLKAIKKILPYLEKGLSYNEACEKADYD
YKNNGIKFKRGELLPVVDKDLIANPVVLRAISQTRKVVNAIIRKYGTPHTIHVEVARDLAKSYD
DRQTIIKENKKRELENEKTKKFISEEFGIKNVKGKLLLKYRLYQEQEGRCAYSRKELSLSEVIL
DESMTDIDHIIPYSRSMDDSYSNKVLVLSGENRKKSNLLPKEYFDRQGRDWDTFVLNVKAMKIH
PRKKSNLLKEKFTREDNKDWKSRALNDTRYISRFVANYLENALEYRDDSPKKRVFMIPGQLTAQ
LRARWRLNKVRENGDLHHALDAAVVAVTDQKAINNISNISRYKELKNCKDVIPSIEYHADEETG
EVYFEEVKDTRFPMPWSGFDLELQKRLESENPREEFYNLLSDKRYLGWFNYEEGFIEKLRPVFV
SRMPNRGVKGQAHQETIRSSKKISNQIAVSKKPLNSIKLKDLEKMQGRDTDRKLYEALKNRLEE
YDDKPEKAFAEPFYKPTNSGKRGPLVRGIKVEEKQNVGVYVNGGQASNGSMVRIDVFRKNGKFY
TVPIYVHQTLLKELPNRAINGKPYKDWDLIDGSFEFLYSFYPNDLIEIEFGKSKSIKNDNKLTK
TEIPEVNLSEVLGYYRGMDTSTGAATIDTQDGKIQMRIGIKTVKNIKKYQVDVLGNVYKVKREK
RQTF
SEQ ID NO: 370
MSKKVSRRYEEQAQEICQRLGSRPYSIGLDLGVGSIGVAVAAYDPIKKQPSDLVFVSSRIFIPS
TGAAERRQKRGQRNSLRHRANRLKFLWKLLAERNLMLSYSEQDVPDPARLRFEDAVVRANPYEL
RLKGLNEQLTLSELGYALYHIANHRGSSSVRTFLDEEKSSDDKKLEEQQAMTEQLAKEKGISTF
IEVLTAFNTNGLIGYRNSESVKSKGVPVPTRDIISNEIDVLLQTQKQFYQEILSDEYCDRIVSA
ILFENEKIVPEAGCCPYFPDEKKLPRCHFLNEERRLWEAINNARIKMPMQEGAAKRYQSASFSD
EQRHILFHIARSGTDITPKLVQKEFPALKTSIIVLQGKEKAIQKIAGFRFRRLEEKSFWKRLSE
EQKDDFFSAWTNTPDDKRLSKYLMKHLLLTENEVVDALKTVSLIGDYGPIGKTATQLLMKHLED
GLTYTEALERGMETGEFQELSVWEQQSLLPYYGQILTGSTQALMGKYWHSAFKEKRDSEGFFKP
NTNSDEEKYGRIANPVVHQTLNELRKLMNELITILGAKPQEITVELARELKVGAEKREDIIKQQ
TKQEKEAVLAYSKYCEPNNLDKRYIERFRLLEDQAFVCPYCLEHISVADIAAGRADVDHIFPRD
DTADNSYGNKVVAHRQCNDIKGKRTPYAAFSNTSAWGPIMHYLDETPGMWRKRRKFETNEEEYA
KYLQSKGFVSRFESDNSYIAKAAKEYLRCLFNPNNVTAVGSLKGMETSILRKAWNLQGIDDLLG
SRHWSKDADTSPTMRKNRDDNRHHGLDAIVALYCSRSLVQMINTMSEQGKRAVEIEAMIPIPGY
ASEPNLSFEAQRELFRKKILEFMDLHAFVSMKTDNDANGALLKDTVYSILGADTQGEDLVFVVK
KKIKDIGVKIGDYEEVASAIRGRITDKQPKWYPMEMKDKIEQLQSKNEAALQKYKESLVQAAAV
LEESNRKLIESGKKPIQLSEKTISKKALELVGGYYYLISNNKRTKTFVVKEPSNEVKGFAFDTG
SNLCLDFYHDAQGKLCGEIIRKIQAMNPSYKPAYMKQGYSLYVRLYQGDVCELRASDLTEAESN
LAKTTHVRLPNAKPGRTFVIIITFTEMGSGYQIYFSNLAKSKKGQDTSFTLTTIKNYDVRKVQL
SSAGLVRYVSPLLVDKIEKDEVALCGE
SEQ ID NO: 371
MNQKFILGLDIGITSVGYGLIDYETKNIIDAGVRLFPEANVENNEGRRSKRGSRRLKRRRIHRL
ERVKKLLEDYNLLDQSQIPQSTNPYAIRVKGLSEALSKDELVIALLHIAKRRGIHKIDVIDSND
DVGNELSTKEQLNKNSKLLKDKFVCQIQLERMNEGQVRGEKNRFKTADIIKEIIQLLNVQKNFH
QLDENFINKYIELVEMRREYFEGPGKGSPYGWEGDPKAWYETLMGHCTYFPDELRSVKYAYSAD
LFNALNDLNNLVIQRDGLSKLEYHEKYHIIENVFKQKKKPTLKQIANEINVNPEDIKGYRITKS
GKPQFTEFKLYHDLKSVLFDQSILENEDVLDQIAEILTIYQDKDSIKSKLTELDILLNEEDKEN
IAQLTGYTGTHRLSLKCIRLVLEEQWYSSRNQMEIFTHLNIKPKKINLTAANKIPKAMIDEFIL
SPVVKRTFGQAINLINKIIEKYGVPEDIIIELARENNSKDKQKFINEMQKKNENTRKRINEIIG
KYGNQNAKRLVEKIRLHDEQEGKCLYSLESIPLEDLLNNPNHYEVDHIIPRSVSFDNSYHNKVL
VKQSENSKKSNLTPYQYFNSGKSKLSYNQFKQHILNLSKSQDRISKKKKEYLLEERDINKFEVQ
KEFINRNLVDTRYATRELTNYLKAYFSANNMNVKVKTINGSFTDYLRKVWKFKKERNHGYKHHA
EDALIIANADFLFKENKKLKAVNSVLEKPEIESKQLDIQVDSEDNYSEMFIIPKQVQDIKDFRN
FKYSHRVDKKPNRQLINDTLYSTRKKDNSTYIVQTIKDIYAKDNTTLKKQFDKSPEKFLMYQHD
PRTFEKLEVIMKQYANEKNPLAKYHEETGEYLTKYSKKNNGPIVKSLKYIGNKLGSHLDVTHQF
KSSTKKLVKLSIKPYRFDVYLTDKGYKFITISYLDVLKKDNYYYIPEQKYDKLKLGKAIDKNAK
FIASFYKNDLIKLDGEIYKIIGVNSDTRNMIELDLPDIRYKEYCELNNIKGEPRIKKTIGKKVN
SIEKLTTDVLGNVFTNTQYTKPQLLFKRGN
SEQ ID NO: 372
MIMKLEKWRLGLDLGTNSIGWSVFSLDKDNSVQDLIDMGVRIFSDGRDPKTKEPLAVARRTARS
QRKLIYRRKLRRKQVFKFLQEQGLFPKTKEECMTLKSLNPYELRIKALDEKLEPYELGRALFNL
AVRRGFKSNRKDGSREEVSEKKSPDEIKTQADMQTHLEKAIKENGCRTITEFLYKNQGENGGIR
FAPGRMTYYPTRKMYEEEFNLIRSKQEKYYPQVDWDDIYKAIFYQRPLKPQQRGYCIYENDKER
TFKAMPCSQKLRILQDIGNLAYYEGGSKKRVELNDNQDKVLYELLNSKDKVTFDQMRKALCLAD
SNSFNLEENRDFLIGNPTAVKMRSKNRFGKLWDEIPLEEQDLIIETIITADEDDAVYEVIKKYD
LTQEQRDFIVKNTILQSGTSMLCKEVSEKLVKRLEEIADLKYHEAVESLGYKFADQTVEKYDLL
PYYGKVLPGSTMEIDLSAPETNPEKHYGKISNPTVHVALNQTRVVVNALIKEYGKPSQIAIELS
RDLKNNVEKKAEIARKQNQRAKENIAINDTISALYHTAFPGKSFYPNRNDRMKYRLWSELGLGN
KCIYCGKGISGAELFTKEIEIEHILPFSRTLLDAESNLTVAHSSCNAFKAERSPFEAFGTNPSG
YSWQEIIQRANQLKNTSKKNKFSPNAMDSFEKDSSFIARQLSDNQYIAKAALRYLKCLVENPSD
VWTTNGSMTKLLRDKWEMDSILCRKFTEKEVALLGLKPEQIGNYKKNRFDHRHHAIDAVVIGLT
DRSMVQKLATKNSHKGNRIEIPEFPILRSDLIEKVKNIVVSFKPDHGAEGKLSKETLLGKIKLH
GKETFVCRENIVSLSEKNLDDIVDEIKSKVKDYVAKHKGQKIEAVLSDFSKENGIKKVRCVNRV
QTPIEITSGKISRYLSPEDYFAAVIWEIPGEKKTFKAQYIRRNEVEKNSKGLNVVKPAVLENGK
PHPAAKQVCLLHKDDYLEFSDKGKMYFCRIAGYAATNNKLDIRPVYAVSYCADWINSTNETMLT
GYWKPTPTQNWVSVNVLFDKQKARLVTVSPIGRVFRK
SEQ ID NO: 373
MSSKAIDSLEQLDLFKPQEYTLGLDLGIKSIGWAILSGERIANAGVYLFETAEELNSTGNKLIS
KAAERGRKRRIRRMLDRKARRGRHIRYLLEREGLPTDELEEVVVHQSNRTLWDVRAEAVERKLT
KQELAAVLFHLVRHRGYFPNTKKLPPDDESDSADEEQGKINRATSRLREELKASDCKTIGQFLA
QNRDRQRNREGDYSNLMARKLVFEEALQILAFQRKQGHELSKDFEKTYLDVLMGQRSGRSPKLG
NCSLIPSELRAPSSAPSTEWFKFLQNLGNLQISNAYREEWSIDAPRRAQIIDACSQRSTSSYWQ
IRRDFQIPDEYRFNLVNYERRDPDVDLQEYLQQQERKTLANFRNWKQLEKIIGTGHPIQTLDEA
ARLITLIKDDEKLSDQLADLLPEASDKAITQLCELDFTTAAKISLEAMYRILPHMNQGMGFFDA
CQQESLPEIGVPPAGDRVPPFDEMYNPVVNRVLSQSRKLINAVIDEYGMPAKIRVELARDLGKG
RELRERIKLDQLDKSKQNDQRAEDFRAEFQQAPRGDQSLRYRLWKEQNCTCPYSGRMIPVNSVL
SEDTQIDHILPISQSFDNSLSNKVLCFTEENAQKSNRTPFEYLDAADFQRLEAISGNWPEAKRN
KLLHKSFGKVAEEWKSRALNDTRYLTSALADHLRHHLPDSKIQTVNGRITGYLRKQWGLEKDRD
KHTHHAVDAIVVACTTPAIVQQVTLYHQDIRRYKKLGEKRPTPWPETFRQDVLDVEEEIFITRQ
PKKVSGGIQTKDTLRKHRSKPDRQRVALTKVKLADLERLVEKDASNRNLYEHLKQCLEESGDQP
TKAFKAPFYMPSGPEAKQRPILSKVTLLREKPEPPKQLTELSGGRRYDSMAQGRLDIYRYKPGG
KRKDEYRVVLQRMIDLMRGEENVHVFQKGVPYDQGPEIEQNYTFLFSLYFDDLVEFQRSADSEV
IRGYYRTFNIANGQLKISTYLEGRQDFDFFGANRLAHFAKVQVNLLGKVIK
SEQ ID NO: 374
MRSLRYRLALDLGSTSLGWALFRLDACNRPTAVIKAGVRIFSDGRNPKDGSSLAVTRRAARAMR
RRRDRLLKRKTRMQAKLVEHGFFPADAGKRKALEQLNPYALRAKGLQEALLPGEFARALFHINQ
RRGFKSNRKTDKKDNDSGVLKKAIGQLRQQMAEQGSRTVGEYLWTRLQQGQGVRARYREKPYTT
EEGKKRIDKSYDLYIDRAMIEQEFDALWAAQAAFNPTLFHEAARADLKDTLLHQRPLRPVKPGR
CTLLPEEERAPLALPSTQRFRIHQEVNHLRLLDENLREVALTLAQRDAVVTALETKAKLSFEQI
RKLLKLSGSVQFNLEDAKRTELKGNATSAALARKELFGAAWSGFDEALQDEIVWQLVTEEGEGA
LIAWLQTHTGVDEARAQAIVDVSLPEGYGNLSRKALARIVPALRAAVITYDKAVQAAGFDHHSQ
LGFEYDASEVEDLVHPETGEIRSVFKQLPYYGKALQRHVAFGSGKPEDPDEKRYGKIANPTVHI
GLNQVRMVVNALIRRYGRPTEVVIELARDLKQSREQKVEAQRRQADNQRRNARIRRSIAEVLGI
GEERVRGSDIQKWICWEELSFDAADRRCPYSGVQISAAMLLSDEVEVEHILPFSKTLDDSLNNR
TVAMRQANRIKRNRTPWDARAEFEAQGWSYEDILQRAERMPLRKRYRFAPDGYERWLGDDKDFL
ARALNDTRYLSRVAAEYLRLVCPGTRVIPGQLTALLRGKFGLNDVLGLDGEKNRNDHRHHAVDA
CVIGVTDQGLMQRFATASAQARGDGLTRLVDGMPMPWPTYRDHVERAVRHIWVSHRPDHGFEGA
MMEETSYGIRKDGSIKQRRKADGSAGREISNLIRIHEATQPLRHGVSADGQPLAYKGYVGGSNY
CIEITVNDKGKWEGEVISTFRAYGVVRAGGMGRLRNPHEGQNGRKLIMRLVIGDSVRLEVDGAE
RTMRIVKISGSNGQIFMAPIHEANVDARNTDKQDAFTYTSKYAGSLQKAKTRRVTISPIGEVRD
PGFKG
SEQ ID NO: 375
MARPAFRAPRREHVNGWTPDPHRISKPFFILVSWHLLSRVVIDSSSGCFPGTSRDHTDKFAEWE
CAVQPYRLSFDLGTNSIGWGLLNLDRQGKPREIRALGSRIFSDGRDPQDKASLAVARRLARQMR
RRRDRYLTRRTRLMGALVRFGLMPADPAARKRLEVAVDPYLARERATRERLEPFEIGRALFHLN
QRRGYKPVRTATKPDEEAGKVKEAVERLEAAIAAAGAPTLGAWFAWRKTRGETLRARLAGKGKE
AAYPFYPARRMLEAEFDTLWAEQARHHPDLLTAEAREILRHRIFHQRPLKPPPVGRCTLYPDDG
RAPRALPSAQRLRLFQELASLRVIHLDLSERPLTPAERDRIVAFVQGRPPKAGRKPGKVQKSVP
FEKLRGLLELPPGTGFSLESDKRPELLGDETGARIAPAFGPGWTALPLEEQDALVELLLTEAEP
ERAIAALTARWALDEATAAKLAGATLPDFHGRYGRRAVAELLPVLERETRGDPDGRVRPIRLDE
AVKLLRGGKDHSDFSREGALLDALPYYGAVLERHVAFGTGNPADPEEKRVGRVANPTVHIALNQ
LRHLVNAILARHGRPEEIVIELARDLKRSAEDRRREDKRQADNQKRNEERKRLILSLGERPTPR
NLLKLRLWEEQGPVENRRCPYSGETISMRMLLSEQVDIDHILPFSVSLDDSAANKVVCLREANR
IKRNRSPWEAFGHDSERWAGILARAEALPKNKRWRFAPDALEKLEGEGGLRARHLNDTRHLSRL
AVEYLRCVCPKVRVSPGRLTALLRRRWGIDAILAEADGPPPEVPAETLDPSPAEKNRADHRHHA
LDAVVIGCIDRSMVQRVQLAAASAEREAAAREDNIRRVLEGFKEEPWDGFRAELERRARTIVVS
HRPEHGIGGALHKETAYGPVDPPEEGFNLVVRKPIDGLSKDEINSVRDPRLRRALIDRLAIRRR
DANDPATALAKAAEDLAAQPASRGIRRVRVLKKESNPIRVEHGGNPSGPRSGGPFHKLLLAGEV
HHVDVALRADGRRWVGHWVTLFEAHGGRGADGAAAPPRLGDGERFLMRLHKGDCLKLEHKGRVR
VMQVVKLEPSSNSVVVVEPHQVKTDRSKHVKISCDQLRARGARRVTVDPLGRVRVHAPGARVGI
GGDAGRTAMEPAEDIS
SEQ ID NO: 376
MKRTSLRAYRLGVDLGANSLGWFVVWLDDHGQPEGLGPGGVRIFPDGRNPQSKQSNAAGRRLAR
SARRRRDRYLQRRGKLMGLLVKHGLMPADEPARKRLECLDPYGLRAKALDEVLPLHHVGRALFH
LNQRRGLFANRAIEQGDKDASAIKAAAGRLQTSMQACGARTLGEFLNRRHQLRATVRARSPVGG
DVQARYEFYPTRAMVDAEFEAIWAAQAPHHPTMTAEAHDTIREAIFSQRAMKRPSIGKCSLDPA
TSQDDVDGFRCAWSHPLAQRFRIWQDVRNLAVVETGPTSSRLGKEDQDKVARALLQTDQLSFDE
IRGLLGLPSDARFNLESDRRDHLKGDATGAILSARRHFGPAWHDRSLDRQIDIVALLESALDEA
AIIASLGTTHSLDEAAAQRALSALLPDGYCRLGLRAIKRVLPLMEAGRTYAEAASAAGYDHALL
PGGKLSPTGYLPYYGQWLQNDVVGSDDERDTNERRWGRLPNPTVHIGIGQLRRVVNELIRWHGP
PAEITVELTRDLKLSPRRLAELEREQAENQRKNDKRTSLLRKLGLPASTHNLLKLRLWDEQGDV
ASECPYTGEAIGLERLVSDDVDIDHLIPFSISWDDSAANKVVCMRYANREKGNRTPFEAFGHRQ
GRPYDWADIAERAARLPRGKRWRFGPGARAQFEELGDFQARLLNETSWLARVAKQYLAAVTHPH
RIHVLPGRLTALLRATWELNDLLPGSDDRAAKSRKDHRHHAIDALVAALTDQALLRRMANAHDD
TRRKIEVLLPWPTFRIDLETRLKAMLVSHKPDHGLQARLHEDTAYGTVEHPETEDGANLVYRKT
FVDISEKEIDRIRDRRLRDLVRAHVAGERQQGKTLKAAVLSFAQRRDIAGHPNGIRHVRLTKSI
KPDYLVPIRDKAGRIYKSYNAGENAFVDILQAESGRWIARATTVFQANQANESHDAPAAQPIMR
VFKGDMLRIDHAGAEKFVKIVRLSPSNNLLYLVEHHQAGVFQTRHDDPEDSFRWLFASFDKLRE
WNAELVRIDTLGQPWRRKRGLETGSEDATRIGWTRPKKWP
SEQ ID NO: 377
MERIFGFDIGTTSIGFSVIDYSSTQSAGNIQRLGVRIFPEARDPDGTPLNQQRRQKRMMRRQLR
RRRIRRKALNETLHEAGFLPAYGSADWPVVMADEPYELRRRGLEEGLSAYEFGRAIYHLAQHRH
FKGRELEESDTPDPDVDDEKEAANERAATLKALKNEQTTLGAWLARRPPSDRKRGIHAHRNVVA
EEFERLWEVQSKFHPALKSEEMRARISDTIFAQRPVFWRKNTLGECRFMPGEPLCPKGSWLSQQ
RRMLEKLNNLAIAGGNARPLDAEERDAILSKLQQQASMSWPGVRSALKALYKQRGEPGAEKSLK
FNLELGGESKLLGNALEAKLADMFGPDWPAHPRKQEIRHAVHERLWAADYGETPDKKRVIILSE
KDRKAHREAAANSFVADFGITGEQAAQLQALKLPTGWEPYSIPALNLFLAELEKGERFGALVNG
PDWEGWRRTNFPHRNQPTGEILDKLPSPASKEERERISQLRNPTVVRTQNELRKVVNNLIGLYG
KPDRIRIEVGRDVGKSKREREEIQSGIRRNEKQRKKATEDLIKNGIANPSRDDVEKWILWKEGQ
ERCPYTGDQIGFNALFREGRYEVEHIWPRSRSFDNSPRNKTLCRKDVNIEKGNRMPFEAFGHDE
DRWSAIQIRLQGMVSAKGGTGMSPGKVKRFLAKTMPEDFAARQLNDTRYAAKQILAQLKRLWPD
MGPEAPVKVEAVTGQVTAQLRKLWTLNNILADDGEKTRADHRHHAIDALTVACTHPGMTNKLSR
YWQLRDDPRAEKPALTPPWDTIRADAEKAVSEIVVSHRVRKKVSGPLHKETTYGDTGTDIKTKS
GTYRQFVTRKKIESLSKGELDEIRDPRIKEIVAAHVAGRGGDPKKAFPPYPCVSPGGPEIRKVR
LTSKQQLNLMAQTGNGYADLGSNHHIAIYRLPDGKADFEIVSLFDASRRLAQRNPIVQRTRADG
ASFVMSLAAGEAIMIPEGSKKGIWIVQGVWASGQVVLERDTDADHSTTTRPMPNPILKDDAKKV
SIDPIGRVRPSND
SEQ ID NO: 378
MNKRILGLDTGTNSLGWAVVDWDEHAQSYELIKYGDVIFQEGVKIEKGIESSKAAERSGYKAIR
KQYFRRRLRKIQVLKVLVKYHLCPYLSDDDLRQWHLQKQYPKSDELMLWQRTSDEEGKNPYYDR
HRCLHEKLDLTVEADRYTLGRALYHLTQRRGFLSNRLDTSADNKEDGVVKSGISQLSTEMEEAG
CEYLGDYFYKLYDAQGNKVRIRQRYTDRNKHYQHEFDAICEKQELSSELIEDLQRAIFFQLPLK
SQRHGVGRCTFERGKPRCADSHPDYEEFRMLCFVNNIQVKGPHDLELRPLTYEEREKIEPLFFR
KSKPNFDFEDIAKALAGKKNYAWIHDKEERAYKFNYRMTQGVPGCPTIAQLKSIFGDDWKTGIA
ETYTLIQKKNGSKSLQEMVDDVWNVLYSFSSVEKLKEFAHHKLQLDEESAEKFAKIKLSHSFAA
LSLKAIRKFLPFLRKGMYYTHASFFANIPTIVGKEIWNKEQNRKYIMENVGELVFNYQPKHREV
QGTIEMLIKDFLANNFELPAGATDKLYHPSMIETYPNAQRNEFGILQLGSPRTNAIRNPMAMRS
LHILRRVVNQLLKESIIDENTEVHVEYARELNDANKRRAIADRQKEQDKQHKKYGDEIRKLYKE
ETGKDIEPTQTDVLKFQLWEEQNHHCLYTGEQIGITDFIGSNPKFDIEHTIPQSVGGDSTQMNL
TLCDNRFNREVKKAKLPTELANHEEILTRIEPWKNKYEQLVKERDKQRTFAGMDKAVKDIRIQK
RHKLQMEIDYWRGKYERFTMTEVPEGFSRRQGTGIGLISRYAGLYLKSLFHQADSRNKSNVYVV
KGVATAEFRKMWGLQSEYEKKCRDNHSHHCMDAITIACIGKREYDLMAEYYRMEETFKQGRGSK
PKFSKPWATFTEDVLNIYKNLLVVHDTPNNMPKHTKKYVQTSIGKVLAQGDTARGSLHLDTYYG
AIERDGEIRYVVRRPLSSFTKPEELENIVDETVKRTIKEAIADKNFKQAIAEPIYMNEEKGILI
KKVRCFAKSVKQPINIRQHRDLSKKEYKQQYHVMNENNYLLAIYEGLVKNKVVREFEIVSYIEA
AKYYKRSQDRNIFSSIVPTHSTKYGLPLKTKLLMGQLVLMFEENPDEIQVDNTKDLVKRLYKVV
GIEKDGRIKFKYHQEARKEGLPIFSTPYKNNDDYAPIFRQSINNINILVDGIDFTIDILGKVTL
KE
SEQ ID NO: 379
MNYKMGLDIGIASVGWAVINLDLKRIEDLGVRIFDKAEHPQNGESLALPRRIARSARRRLRRRK
HRLERIRRLLVSENVLTKEEMNLLFKQKKQIDVWQLRVDALERKLNNDELARVLLHLAKRRGFK
SNRKSERNSKESSEFLKNIEENQSILAQYRSVGEMIVKDSKFAYHKRNKLDSYSNMIARDDLER
EIKLIFEKQREFNNPVCTERLEEKYLNIWSSQRPFASKEDIEKKVGFCTFEPKEKRAPKATYTF
QSFIVWEHINKLRLVSPDETRALTEIERNLLYKQAFSKNKMTYYDIRKLLNLSDDIHFKGLLYD
PKSSLKQIENIRFLELDSYHKIRKCIENVYGKDGIRMFNETDIDTFGYALTIFKDDEDIVAYLQ
NEYITKNGKRVSNLANKVYDKSLIDELLNLSFSKFAHLSMKAIRNILPYMEQGEIYSKACELAG
YNFTGPKKKEKALLLPVIPNIANPVVMRALTQSRKVVNAIIKKYGSPVSIHIELARDLSHSFDE
RKKIQKDQTENRKKNETAIKQLIEYELTKNPTGLDIVKFKLWSEQQGRCMYSLKPIELERLLEP
GYVEVDHILPYSRSLDDSYANKVLVLTKENREKGNHTPVEYLGLGSERWKKFEKFVLANKQFSK
KKKQNLLRLRYEETEEKEFKERNLNDTRYISKFFANFIKEHLKFADGDGGQKVYTINGKITAHL
RSRWDFNKNREESDLHHAVDAVIVACATQGMIKKITEFYKAREQNKESAKKKEPIFPQPWPHFA
DELKARLSKFPQESIEAFALGNYDRKKLESLRPVFVSRMPKRSVTGAAHQETLRRCVGIDEQSG
KIQTAVKTKLSDIKLDKDGHFPMYQKESDPRTYEAIRQRLLEHNNDPKKAFQEPLYKPKKNGEP
GPVIRTVKIIDTKNKVVHLDGSKTVAYNSNIVRTDVFEKDGKYYCVPVYTMDIMKGTLPNKAIE
ANKPYSEWKEMTEEYTFQFSLFPNDLVRIVLPREKTIKTSTNEEIIIKDIFAYYKTIDSATGGL
ELISHDRNFSLRGVGSKTLKRFEKYQVDVLGNIHKVKGEKRVGLAAPTNQKKGKTVDSLQSVSD
SEQ ID NO: 380
MRRLGLDLGTNSIGWCLLDLGDDGEPVSIFRTGARIFSDGRDPKSLGSLKATRREARLTRRRRD
RFIQRQKNLINALVKYGLMPADEIQRQALAYKDPYPIRKKALDEAIDPYEMGRAIFHINQRRGF
KSNRKSADNEAGVVKQSIADLEMKLGEAGARTIGEFLADRQATNDTVRARRLSGTNALYEFYPD
RYMLEQEFDTLWAKQAAFNPSLYIEAARERLKEIVFFQRKLKPQEVGRCIFLSDEDRISKALPS
FQRFRIYQELSNLAWIDHDGVAHRITASLALRDHLFDELEHKKKLTFKAMRAILRKQGVVDYPV
GFNLESDNRDHLIGNLTSCIMRDAKKMIGSAWDRLDEEEQDSFILMLQDDQKGDDEVRSILTQQ
YGLSDDVAEDCLDVRLPDGHGSLSKKAIDRILPVLRDQGLIYYDAVKEAGLGEANLYDPYAALS
DKLDYYGKALAGHVMGASGKFEDSDEKRYGTISNPTVHIALNQVRAVVNELIRLHGKPDEVVIE
IGRDLPMGADGKRELERFQKEGRAKNERARDELKKLGHIDSRESRQKFQLWEQLAKEPVDRCCP
FTGKMMSISDLFSDKVEIEHLLPFSLTLDDSMANKTVCFRQANRDKGNRAPFDAFGNSPAGYDW
QEILGRSQNLPYAKRWRFLPDAMKRFEADGGFLERQLNDTRYISRYTTEYISTIIPKNKIWVVT
GRLTSLLRGFWGLNSILRGHNTDDGTPAKKSRDDHRHHAIDAIVVGMTSRGLLQKVSKAARRSE
DLDLTRLFEGRIDPWDGFRDEVKKHIDAIIVSHRPRKKSQGALHNDTAYGIVEHAENGASTVVH
RVPITSLGKQSDIEKVRDPLIKSALLNETAGLSGKSFENAVQKWCADNSIKSLRIVETVSIIPI
TDKEGVAYKGYKGDGNAYMDIYQDPTSSKWKGEIVSRFDANQKGFIPSWQSQFPTARLIMRLRI
NDLLKLQDGEIEEIYRVQRLSGSKILMAPHTEANVDARDRDKNDTFKLTSKSPGKLQSASARKV
HISPTGLIREG
SEQ ID NO: 381
MKNILGLDLGLSSIGWSVIRENSEEQELVAMGSRVVSLTAAELSSFTQGNGVSINSQRTQKRTQ
RKGYDRYQLRRTLLRNKLDTLGMLPDDSLSYLPKLQLWGLRAKAVTQRIELNELGRVLLHLNQK
RGYKSIKSDFSGDKKITDYVKTVKTRYDELKEMRLTIGELFFRRLTENAFFRCKEQVYPRQAYV
EEFDCIMNCQRKFYPDILTDETIRCIRDEIIYYQRPLKSCKYLVSRCEFEKRFYLNAAGKKTEA
GPKVSPRTSPLFQVCRLWESINNIVVKDRRNEIVFISAEQRAALFDFLNTHEKLKGSDLLKLLG
LSKTYGYRLGEQFKTGIQGNKTRVEIERALGNYPDKKRLLQFNLQEESSSMVNTETGEIIPMIS
LSFEQEPLYRLWHVLYSIDDREQLQSVLRQKFGIDDDEVLERLSAIDLVKAGFGNKSSKAIRRI
LPFLQLGMNYAEACEAAGYNHSNNYTKAENEARALLDRLPAIKKNELRQPVVEKILNQMVNVVN
ALMEKYGRFDEIRVELARELKQSKEERSNTYKSINKNQRENEQIAKRIVEYGVPTRSRIQKYKM
WEESKHCCIYCGQPVDVGDFLRGFDVEVEHIIPKSLYFDDSFANKVCSCRSCNKEKNNRTAYDY
MKSKGEKALSDYVERVNTMYTNNQISKTKWQNLLTPVDKISIDFIDRQLRESQYIARKAKEILT
SICYNVTATSGSVTSFLRHVWGWDTVLHDLNFDRYKKVGLTEVIEVNHRGSVIRREQIKDWSKR
FDHRHHAIDALTIACTKQAYIQRLNNLRAEEGPDFNKMSLERYIQSQPHFSVAQVREAVDRILV
SFRAGKRAVTPGKRYIRKNRKRISVQSVLIPRGALSEESVYGVIHVWEKDEQGHVIQKQRAVMK
YPITSINREMLDKEKVVDKRIHRILSGRLAQYNDNPKEAFAKPVYIDKECRIPIRTVRCFAKPA
INTLVPLKKDDKGNPVAWVNPGNNHHVAIYRDEDGKYKERTVTFWEAVDRCRVGIPAIVTQPDT
IWDNILQRNDISENVLESLPDVKWQFVLSLQQNEMFILGMNEEDYRYAMDQQDYALLNKYLYRV
QKLSKSDYSFRYHTETSVEDKYDGKPNLKLSMQMGKLKRVSIKSLLGLNPHKVHISVLGEIKEI
S
SEQ ID NO: 382
MAEKQHRWGLDIGTNSIGWAVIALIEGRPAGLVATGSRIFSDGRNPKDGSSLAVERRGPRQMRR
RRDRYLRRRDRFMQALINVGLMPGDAAARKALVTENPYVLRQRGLDQALTLPEFGRALFHLNQR
RGFQSNRKTDRATAKESGKVKNAIAAFRAGMGNARTVGEALARRLEDGRPVRARMVGQGKDEHY
ELYIAREWIAQEFDALWASQQRFHAEVLADAARDRLRAILLFQRKLLPVPVGKCFLEPNQPRVA
AALPSAQRFRLMQELNHLRVMTLADKRERPLSFQERNDLLAQLVARPKCGFDMLRKIVFGANKE
AYRFTIESERRKELKGCDTAAKLAKVNALGTRWQALSLDEQDRLVCLLLDGENDAVLADALREH
YGLTDAQIDTLLGLSFEDGHMRLGRSALLRVLDALESGRDEQGLPLSYDKAVVAAGYPAHTADL
ENGERDALPYYGELLWRYTQDAPTAKNDAERKFGKIANPTVHIGLNQLRKLVNALIQRYGKPAQ
IVVELARNLKAGLEEKERIKKQQTANLERNERIRQKLQDAGVPDNRENRLRMRLFEELGQGNGL
GTPCIYSGRQISLQRLFSNDVQVDHILPFSKTLDDSFANKVLAQHDANRYKGNRGPFEAFGANR
DGYAWDDIRARAAVLPRNKRNRFAETAMQDWLHNETDFLARQLTDTAYLSRVARQYLTAICSKD
DVYVSPGRLTAMLRAKWGLNRVLDGVMEEQGRPAVKNRDDHRHHAIDAVVIGATDRAMLQQVAT
LAARAREQDAERLIGDMPTPWPNFLEDVRAAVARCVVSHKPDHGPEGGLHNDTAYGIVAGPFED
GRYRVRHRVSLFDLKPGDLSNVRCDAPLQAELEPIFEQDDARAREVALTALAERYRQRKVWLEE
LMSVLPIRPRGEDGKTLPDSAPYKAYKGDSNYCYELFINERGRWDGELISTFRANQAAYRRFRN
DPARFRRYTAGGRPLLMRLCINDYIAVGTAAERTIFRVVKMSENKITLAEHFEGGTLKQRDADK
DDPFKYLTKSPGALRDLGARRIFVDLIGRVLDPGIKGD
SEQ ID NO: 383
MIERILGVDLGISSLGWAIVEYDKDDEAANRIIDCGVRLFTAAETPKKKESPNKARREARGIRR
VLNRRRVRMNMIKKLFLRAGLIQDVDLDGEGGMFYSKANRADVWELRHDGLYRLLKGDELARVL
IHIAKHRGYKFIGDDEADEESGKVKKAGVVLRQNFEAAGCRTVGEWLWRERGANGKKRNKHGDY
EISIHRDLLVEEVEAIFVAQQEMRSTIATDALKAAYREIAFFVRPMQRIEKMVGHCTYFPEERR
APKSAPTAEKFIAISKFFSTVIIDNEGWEQKIIERKTLEELLDFAVSREKVEFRHLRKFLDLSD
NEIFKGLHYKGKPKTAKKREATLFDPNEPTELEFDKVEAEKKAWISLRGAAKLREALGNEFYGR
FVALGKHADEATKILTYYKDEGQKRRELTKLPLEAEMVERLVKIGFSDFLKLSLKAIRDILPAM
ESGARYDEAVLMLGVPHKEKSAILPPLNKTDIDILNPTVIRAFAQFRKVANALVRKYGAFDRVH
FELAREINTKGEIEDIKESQRKNEKERKEAADWIAETSFQVPLTRKNILKKRLYIQQDGRCAYT
GDVIELERLFDEGYCEIDHILPRSRSADDSFANKVLCLARANQQKTDRTPYEWFGHDAARWNAF
ETRTSAPSNRVRTGKGKIDRLLKKNFDENSEMAFKDRNLNDTRYMARAIKTYCEQYWVFKNSHT
KAPVQVRSGKLTSVLRYQWGLESKDRESHTHHAVDAIIIAFSTQGMVQKLSEYYRFKETHREKE
RPKLAVPLANFRDAVEEATRIENTETVKEGVEVKRLLISRPPRARVTGQAHEQTAKPYPRIKQV
KNKKKWRLAPIDEEKFESFKADRVASANQKNFYETSTIPRVDVYHKKGKFHLVPIYLHEMVLNE
LPNLSLGTNPEAMDENFFKFSIFKDDLISIQTQGTPKKPAKIIMGYFKNMHGANMVLSSINNSP
CEGFTCTPVSMDKKHKDKCKLCPEENRIAGRCLQGFLDYWSQEGLRPPRKEFECDQGVKFALDV
KKYQIDPLGYYYEVKQEKRLGTIPQMRSAKKLVKK
SEQ ID NO: 384
MNNSIKSKPEVTIGLDLGVGSVGWAIVDNETNIIHHLGSRLFSQAKTAEDRRSFRGVRRLIRRR
KYKLKRFVNLIWKYNSYFGFKNKEDILNNYQEQQKLHNTVLNLKSEALNAKIDPKALSWILHDY
LKNRGHFYEDNRDFNVYPTKELAKYFDKYGYYKGIIDSKEDNDNKLEEELTKYKFSNKHWLEEV
KKVLSNQTGLPEKFKEEYESLFSYVRNYSEGPGSINSVSPYGIYHLDEKEGKVVQKYNNIWDKT
IGKCNIFPDEYRAPKNSPIAMIFNEINELSTIRSYSIYLTGWFINQEFKKAYLNKLLDLLIKTN
GEKPIDARQFKKLREETIAESIGKETLKDVENEEKLEKEDHKWKLKGLKLNTNGKIQYNDLSSL
AKFVHKLKQHLKLDFLLEDQYATLDKINFLQSLFVYLGKHLRYSNRVDSANLKEFSDSNKLFER
ILQKQKDGLFKLFEQTDKDDEKILAQTHSLSTKAMLLAITRMTNLDNDEDNQKNNDKGWNFEAI
KNFDQKFIDITKKNNNLSLKQNKRYLDDRFINDAILSPGVKRILREATKVFNAILKQFSEEYDV
TKVVIELARELSEEKELENTKNYKKLIKKNGDKISEGLKALGISEDEIKDILKSPTKSYKFLLW
LQQDHIDPYSLKEIAFDDIFTKTEKFEIDHIIPYSISFDDSSSNKLLVLAESNQAKSNQTPYEF
ISSGNAGIKWEDYEAYCRKFKDGDSSLLDSTQRSKKFAKMMKTDTSSKYDIGFLARNLNDTRYA
TIVFRDALEDYANNHLVEDKPMFKVVCINGSVTSFLRKNFDDSSYAKKDRDKNIHHAVDASIIS
IFSNETKTLFNQLTQFADYKLFKNTDGSWKKIDPKTGVVTEVTDENWKQIRVRNQVSEIAKVIE
KYIQDSNIERKARYSRKIENKTNISLFNDTVYSAKKVGYEDQIKRKNLKTLDIHESAKENKNSK
VKRQFVYRKLVNVSLLNNDKLADLFAEKEDILMYRANPWVINLAEQIFNEYTENKKIKSQNVFE
KYMLDLTKEFPEKFSEFLVKSMLRNKTAIIYDDKKNIVHRIKRLKMLSSELKENKLSNVIIRSK
NQSGTKLSYQDTINSLALMIMRSIDPTAKKQYIRVPLNTLNLHLGDHDFDLHNMDAYLKKPKFV
KYLKANEIGDEYKPWRVLTSGTLLIHKKDKKLMYISSFQNLNDVIEIKNLIETEYKENDDSDSK
KKKKANRFLMTLSTILNDYILLDAKDNFDILGLSKNRIDEILNSKLGLDKIVK
SEQ ID NO: 385
MGGSEVGTVPVTWRLGVDVGERSIGLAAVSYEEDKPKEILAAVSWIHDGGVGDERSGASRLALR
GMARRARRLRRFRRARLRDLDMLLSELGWTPLPDKNVSPVDAWLARKRLAEEYVVDETERRRLL
GYAVSHMARHRGWRNPWTTIKDLKNLPQPSDSWERTRESLEARYSVSLEPGTVGQWAGYLLQRA
PGIRLNPTQQSAGRRAELSNATAFETRLRQEDVLWELRCIADVQGLPEDVVSNVIDAVFCQKRP
SVPAERIGRDPLDPSQLRASRACLEFQEYRIVAAVANLRIRDGSGSRPLSLEERNAVIEALLAQ
TERSLTWSDIALEILKLPNESDLTSVPEEDGPSSLAYSQFAPFDETSARIAEFIAKNRRKIPTF
AQWWQEQDRTSRSDLVAALADNSIAGEEEQELLVHLPDAELEALEGLALPSGRVAYSRLTLSGL
TRVMRDDGVDVHNARKTCFGVDDNWRPPLPALHEATGHPVVDRNLAILRKFLSSATMRWGPPQS
IVVELARGASESRERQAEEEAARRAHRKANDRIRAELRASGLSDPSPADLVRARLLELYDCHCM
YCGAPISWENSELDHIVPRTDGGSNRHENLAITCGACNKEKGRRPFASWAETSNRVQLRDVIDR
VQKLKYSGNMYWTRDEFSRYKKSVVARLKRRTSDPEVIQSIESTGYAAVALRDRLLSYGEKNGV
AQVAVFRGGVTAEARRWLDISIERLFSRVAIFAQSTSTKRLDRRHHAVDAVVLTTLTPGVAKTL
ADARSRRVSAEFWRRPSDVNRHSTEEPQSPAYRQWKESCSGLGDLLISTAARDSIAVAAPLRLR
PTGALHEETLRAFSEHTVGAAWKGAELRRIVEPEVYAAFLALTDPGGRFLKVSPSEDVLPADEN
RHIVLSDRVLGPRDRVKLFPDDRGSIRVRGGAAYIASFHHARVFRWGSSHSPSFALLRVSLADL
AVAGLLRDGVDVFTAELPPWTPAWRYASIALVKAVESGDAKQVGWLVPGDELDFGPEGVTTAAG
DLSMFLKYFPERHWVVTGFEDDKRINLKPAFLSAEQAEVLRTERSDRPDTLTEAGEILAQFFPR
CWRATVAKVLCHPGLTVIRRTALGQPRWRRGHLPYSWRPWSADPWSGGTP
SEQ ID NO: 386
MHNKKNITIGFDLGIASIGWAIIDSTTSKILDWGTRTFEERKTANERRAFRSTRRNIRRKAYRN
QRFINLILKYKDLFELKNISDIQRANKKDTENYEKIISFFTEIYKKCAAKHSNILEVKVKALDS
KIEKLDLIWILHDYLENRGFFYDLEEENVADKYEGIEHPSILLYDFFKKNGFFKSNSSIPKDLG
GYSFSNLQWVNEIKKLFEVQEINPEFSEKFLNLFTSVRDYAKGPGSEHSASEYGIFQKDEKGKV
FKKYDNIWDKTIGKCSFFVEENRSPVNYPSYEIFNLLNQLINLSTDLKTTNKKIWQLSSNDRNE
LLDELLKVKEKAKIISISLKKNEIKKIILKDFGFEKSDIDDQDTIEGRKIIKEEPTTKLEVTKH
LLATIYSHSSDSNWININNILEFLPYLDAICIILDREKSRGQDEVLKKLTEKNIFEVLKIDREK
QLDFVKSIFSNTKFNFKKIGNFSLKAIREFLPKMFEQNKNSEYLKWKDEEIRRKWEEQKSKLGK
TDKKTKYLNPRIFQDEIISPGTKNTFEQAVLVLNQIIKKYSKENIIDAIIIESPREKNDKKTIE
EIKKRNKKGKGKTLEKLFQILNLENKGYKLSDLETKPAKLLDRLRFYHQQDGIDLYTLDKINID
QLINGSQKYEIEHIIPYSMSYDNSQANKILTEKAENLKKGKLIASEYIKRNGDEFYNKYYEKAK
ELFINKYKKNKKLDSYVDLDEDSAKNRFRFLTLQDYDEFQVEFLARNLNDTRYSTKLFYHALVE
HFENNEFFTYIDENSSKHKVKISTIKGHVTKYFRAKPVQKNNGPNENLNNNKPEKIEKNRENNE
HHAVDAAIVAIIGNKNPQIANLLTLADNKTDKKFLLHDENYKENIETGELVKIPKFEVDKLAKV
EDLKKIIQEKYEEAKKHTAIKFSRKTRTILNGGLSDETLYGFKYDEKEDKYFKIIKKKLVTSKN
EELKKYFENPFGKKADGKSEYTVLMAQSHLSEFNKLKEIFEKYNGFSNKTGNAFVEYMNDLALK
EPTLKAEIESAKSVEKLLYYNFKPSDQFTYHDNINNKSFKRFYKNIRIIEYKSIPIKFKILSKH
DGGKSFKDTLFSLYSLVYKVYENGKESYKSIPVTSQMRNFGIDEFDFLDENLYNKEKLDIYKSD
FAKPIPVNCKPVFVLKKGSILKKKSLDIDDFKETKETEEGNYYFISTISKRFNRDTAYGLKPLK
LSVVKPVAEPSTNPIFKEYIPIHLDELGNEYPVKIKEHTDDEKLMCTIK

[0987] Nucleic Acids Encoding Cas9 Molecules

[0988] Nucleic acids encoding the Cas9 molecules or Cas9 polypeptides, e.g., an eaCas9 molecule or eaCas9 polypeptides are provided herein.

[0989] Exemplary nucleic acids encoding Cas9 molecules or Cas9 polypeptides are described in Cong et al., SCIENCE 2013, 399(6121):819-823; Wang et al., CELL 2013, 153(4):910-918; Mali et al., SCIENCE 2013, 399(6121):823-826; Jinek et al., SCIENCE 2012, 337(6096):816-821. Another exemplary nucleic acid encoding a Cas9 molecule or Cas9 polypeptide is shown in FIG. 8.

[0990] In an embodiment, a nucleic acid encoding a Cas9 molecule or Cas9 polypeptide can be a synthetic nucleic acid sequence. For example, the synthetic nucleic acid molecule can be chemically modified, e.g., as described in Section VIII. In an embodiment, the Cas9 mRNA has one or more (e.g., all of the following properties: it is capped, polyadenylated, substituted with 5-methylcytidine and/or pseudouridine.

[0991] In addition, or alternatively, the synthetic nucleic acid sequence can be codon optimized, e.g., at least one non-common codon or less-common codon has been replaced by a common codon. For example, the synthetic nucleic acid can direct the synthesis of an optimized messenger mRNA, e.g., optimized for expression in a mammalian expression system, e.g., described herein.

[0992] In addition, or alternatively, a nucleic acid encoding a Cas9 molecule or Cas9 polypeptide may comprise a nuclear localization sequence (NLS). Nuclear localization sequences are known in the art.

[0993] Provided below is an exemplary codon optimized nucleic acid sequence encoding a Cas9 molecule of S. pyogenes.

(SEQ ID NO: 22)

ATGGATAAAA AGTACAGCAT CGGGCTGGAC ATCGGTACAA
ACTCAGTGGG GTGGGCCGTG ATTACGGACG AGTACAAGGT
ACCCTCCAAA AAATTTAAAG TGCTGGGTAA CACGGACAGA
CACTCTATAA AGAAAAATCT TATTGGAGCC TTGCTGTTCG
ACTCAGGCGA GACAGCCGAA GCCACAAGGT TGAAGCGGAC
CGCCAGGAGG CGGTATACCA GGAGAAAGAA CCGCATATGC
TACCTGCAAG AAATCTTCAG TAACGAGATG GCAAAGGTTG
ACGATAGCTT TTTCCATCGC CTGGAAGAAT CCTTTCTTGT
TGAGGAAGAC AAGAAGCACG AACGGCACCC CATCTTTGGC
AATATTGTCG ACGAAGTGGC ATATCACGAA AAGTACCCGA
CTATCTACCA CCTCAGGAAG AAGCTGGTGG ACTCTACCGA
TAAGGCGGAC CTCAGACTTA TTTATTTGGC ACTCGCCCAC
ATGATTAAAT TTAGAGGACA TTTCTTGATC GAGGGCGACC
TGAACCCGGA CAACAGTGAC GTCGATAAGC TGTTCATCCA
ACTTGTGCAG ACCTACAATC AACTGTTCGA AGAAAACCCT
ATAAATGCTT CAGGAGTCGA CGCTAAAGCA ATCCTGTCCG
CGCGCCTCTC AAAATCTAGA AGACTTGAGA ATCTGATTGC
TCAGTTGCCC GGGGAAAAGA AAAATGGATT GTTTGGCAAC
CTGATCGCCC TCAGTCTCGG ACTGACCCCA AATTTCAAAA
GTAACTTCGA CCTGGCCGAA GACGCTAAGC TCCAGCTGTC
CAAGGACACA TACGATGACG ACCTCGACAA TCTGCTGGCC
CAGATTGGGG ATCAGTACGC CGATCTCTTT TTGGCAGCAA
AGAACCTGTC CGACGCCATC CTGTTGAGCG ATATCTTGAG
AGTGAACACC GAAATTACTA AAGCACCCCT TAGCGCATCT
ATGATCAAGC GGTACGACGA GCATCATCAG GATCTGACCC
TGCTGAAGGC TCTTGTGAGG CAACAGCTCC CCGAAAAATA
CAAGGAAATC TTCTTTGACC AGAGCAAAAA CGGCTACGCT
GGCTATATAG ATGGTGGGGC CAGTCAGGAG GAATTCTATA
AATTCATCAA GCCCATTCTC GAGAAAATGG ACGGCACAGA
GGAGTTGCTG GTCAAACTTA ACAGGGAGGA CCTGCTGCGG
AAGCAGCGGA CCTTTGACAA CGGGTCTATC CCCCACCAGA
TTCATCTGGG CGAACTGCAC GCAATCCTGA GGAGGCAGGA
GGATTTTTAT CCTTTTCTTA AAGATAACCG CGAGAAAATA
GAAAAGATTC TTACATTCAG GATCCCGTAC TACGTGGGAC
CTCTCGCCCG GGGCAATTCA CGGTTTGCCT GGATGACAAG
GAAGTCAGAG GAGACTATTA CACCTTGGAA CTTCGAAGAA
GTGGTGGACA AGGGTGCATC TGCCCAGTCT TTCATCGAGC
GGATGACAAA TTTTGACAAG AACCTCCCTA ATGAGAAGGT
GCTGCCCAAA CATTCTCTGC TCTACGAGTA CTTTACCGTC
TACAATGAAC TGACTAAAGT CAAGTACGTC ACCGAGGGAA
TGAGGAAGCC GGCATTCCTT AGTGGAGAAC AGAAGAAGGC
GATTGTAGAC CTGTTGTTCA AGACCAACAG GAAGGTGACT
GTGAAGCAAC TTAAAGAAGA CTACTTTAAG AAGATCGAAT
GTTTTGACAG TGTGGAAATT TCAGGGGTTG AAGACCGCTT
CAATGCGTCA TTGGGGACTT ACCATGATCT TCTCAAGATC
ATAAAGGACA AAGACTTCCT GGACAACGAA GAAAATGAGG
ATATTCTCGA AGACATCGTC CTCACCCTGA CCCTGTTCGA
AGACAGGGAA ATGATAGAAG AGCGCTTGAA AACCTATGCC
CACCTCTTCG ACGATAAAGT TATGAAGCAG CTGAAGCGCA
GGAGATACAC AGGATGGGGA AGATTGTCAA GGAAGCTGAT
CAATGGAATT AGGGATAAAC AGAGTGGCAA GACCATACTG
GATTTCCTCA AATCTGATGG CTTCGCCAAT AGGAACTTCA
TGCAACTGAT TCACGATGAC TCTCTTACCT TCAAGGAGGA
CATTCAAAAG GCTCAGGTGA GCGGGCAGGG AGACTCCCTT
CATGAACACA TCGCGAATTT GGCAGGTTCC CCCGCTATTA
AAAAGGGCAT CCTTCAAACT GTCAAGGTGG TGGATGAATT
GGTCAAGGTA ATGGGCAGAC ATAAGCCAGA AAATATTGTG
ATCGAGATGG CCCGCGAAAA CCAGACCACA CAGAAGGGCC
AGAAAAATAG TAGAGAGCGG ATGAAGAGGA TCGAGGAGGG
CATCAAAGAG CTGGGATCTC AGATTCTCAA AGAACACCCC
GTAGAAAACA CACAGCTGCA GAACGAAAAA TTGTACTTGT
ACTATCTGCA GAACGGCAGA GACATGTACG TCGACCAAGA
ACTTGATATT AATAGACTGT CCGACTATGA CGTAGACCAT
ATCGTGCCCC AGTCCTTCCT GAAGGACGAC TCCATTGATA
ACAAAGTCTT GACAAGAAGC GACAAGAACA GGGGTAAAAG
TGATAATGTG CCTAGCGAGG AGGTGGTGAA AAAAATGAAG
AACTACTGGC GACAGCTGCT TAATGCAAAG CTCATTACAC
AACGGAAGTT CGATAATCTG ACGAAAGCAG AGAGAGGTGG
CTTGTCTGAG TTGGACAAGG CAGGGTTTAT TAAGCGGCAG
CTGGTGGAAA CTAGGCAGAT CACAAAGCAC GTGGCGCAGA
TTTTGGACAG CCGGATGAAC ACAAAATACG ACGAAAATGA
TAAACTGATA CGAGAGGTCA AAGTTATCAC GCTGAAAAGC
AAGCTGGTGT CCGATTTTCG GAAAGACTTC CAGTTCTACA
AAGTTCGCGA GATTAATAAC TACCATCATG CTCACGATGC
GTACCTGAAC GCTGTTGTCG GGACCGCCTT GATAAAGAAG
TACCCAAAGC TGGAATCCGA GTTCGTATAC GGGGATTACA
AAGTGTACGA TGTGAGGAAA ATGATAGCCA AGTCCGAGCA
GGAGATTGGA AAGGCCACAG CTAAGTACTT CTTTTATTCT
AACATCATGA ATTTTTTTAA GACGGAAATT ACCCTGGCCA
ACGGAGAGAT CAGAAAGCGG CCCCTTATAG AGACAAATGG
TGAAACAGGT GAAATCGTCT GGGATAAGGG CAGGGATTTC
GCTACTGTGA GGAAGGTGCT GAGTATGCCA CAGGTAAATA
TCGTGAAAAA AACCGAAGTA CAGACCGGAG GATTTTCCAA
GGAAAGCATT TTGCCTAAAA GAAACTCAGA CAAGCTCATC
GCCCGCAAGA AAGATTGGGA CCCTAAGAAA TACGGGGGAT
TTGACTCACC CACCGTAGCC TATTCTGTGC TGGTGGTAGC
TAAGGTGGAA AAAGGAAAGT CTAAGAAGCT GAAGTCCGTG
AAGGAACTCT TGGGAATCAC TATCATGGAA AGATCATCCT
TTGAAAAGAA CCCTATCGAT TTCCTGGAGG CTAAGGGTTA
CAAGGAGGTC AAGAAAGACC TCATCATTAA ACTGCCAAAA
TACTCTCTCT TCGAGCTGGA AAATGGCAGG AAGAGAATGT
TGGCCAGCGC CGGAGAGCTG CAAAAGGGAA ACGAGCTTGC
TCTGCCCTCC AAATATGTTA ATTTTCTCTA TCTCGCTTCC
CACTATGAAA AGCTGAAAGG GTCTCCCGAA GATAACGAGC
AGAAGCAGCT GTTCGTCGAA CAGCACAAGC ACTATCTGGA
TGAAATAATC GAACAAATAA GCGAGTTCAG CAAAAGGGTT
ATCCTGGCGG ATGCTAATTT GGACAAAGTA CTGTCTGCTT
ATAACAAGCA CCGGGATAAG CCTATTAGGG AACAAGCCGA
GAATATAATT CACCTCTTTA CACTCACGAA TCTCGGAGCC
CCCGCCGCCT TCAAATACTT TGATACGACT ATCGACCGGA
AACGGTATAC CAGTACCAAA GAGGTCCTCG ATGCCACCCT
CATCCACCAG TCAATTACTG GCCTGTACGA AACACGGATC
GACCTCTCTC AACTGGGCGG CGACTAG

[0994] Provided below is the corresponding amino acid sequence of a S. pyogenes Cas9 molecule.

(SEQ ID NO: 23)

[sequence omitted]

[0995] Provided below is an exemplary codon optimized nucleic acid sequence encoding a Cas9 molecule of N. meningitides.

SEQ ID NO: 24)

ATGGCCGCCTTCAAGCCCAACCCCATCAACTACATCCTGGGCCTGGACAT
CGGCATCGCCAGCGTGGGCTGGGCCATGGTGGAGATCGACGAGGACGAGA
ACCCCATCTGCCTGATCGACCTGGGTGTGCGCGTGTTCGAGCGCGCTGAG
GTGCCCAAGACTGGTGACAGTCTGGCTATGGCTCGCCGGCTTGCTCGCTC
TGTTCGGCGCCTTACTCGCCGGCGCGCTCACCGCCTTCTGCGCGCTCGCC
GCCTGCTGAAGCGCGAGGGTGTGCTGCAGGCTGCCGACTTCGACGAGAAC
GGCCTGATCAAGAGCCTGCCCAACACTCCTTGGCAGCTGCGCGCTGCCGC
TCTGGACCGCAAGCTGACTCCTCTGGAGTGGAGCGCCGTGCTGCTGCACC
TGATCAAGCACCGCGGCTACCTGAGCCAGCGCAAGAACGAGGGCGAGACC
GCCGACAAGGAGCTGGGTGCTCTGCTGAAGGGCGTGGCCGACAACGCCCA
CGCCCTGCAGACTGGTGACTTCCGCACTCCTGCTGAGCTGGCCCTGAACA
AGTTCGAGAAGGAGAGCGGCCACATCCGCAACCAGCGCGGCGACTACAGC
CACACCTTCAGCCGCAAGGACCTGCAGGCCGAGCTGATCCTGCTGTTCGA
GAAGCAGAAGGAGTTCGGCAACCCCCACGTGAGCGGCGGCCTGAAGGAGG
GCATCGAGACCCTGCTGATGACCCAGCGCCCCGCCCTGAGCGGCGACGCC
GTGCAGAAGATGCTGGGCCACTGCACCTTCGAGCCAGCCGAGCCCAAGGC
CGCCAAGAACACCTACACCGCCGAGCGCTTCATCTGGCTGACCAAGCTGA
ACAACCTGCGCATCCTGGAGCAGGGCAGCGAGCGCCCCCTGACCGACACC
GAGCGCGCCACCCTGATGGACGAGCCCTACCGCAAGAGCAAGCTGACCTA
CGCCCAGGCCCGCAAGCTGCTGGGTCTGGAGGACACCGCCTTCTTCAAGG
GCCTGCGCTACGGCAAGGACAACGCCGAGGCCAGCACCCTGATGGAGATG
AAGGCCTACCACGCCATCAGCCGCGCCCTGGAGAAGGAGGGCCTGAAGGA
CAAGAAGAGTCCTCTGAACCTGAGCCCCGAGCTGCAGGACGAGATCGGCA
CCGCCTTCAGCCTGTTCAAGACCGACGAGGACATCACCGGCCGCCTGAAG
GACCGCATCCAGCCCGAGATCCTGGAGGCCCTGCTGAAGCACATCAGCTT
CGACAAGTTCGTGCAGATCAGCCTGAAGGCCCTGCGCCGCATCGTGCCCC
TGATGGAGCAGGGCAAGCGCTACGACGAGGCCTGCGCCGAGATCTACGGC
GACCACTACGGCAAGAAGAACACCGAGGAGAAGATCTACCTGCCTCCTAT
CCCCGCCGACGAGATCCGCAACCCCGTGGTGCTGCGCGCCCTGAGCCAGG
CCCGCAAGGTGATCAACGGCGTGGTGCGCCGCTACGGCAGCCCCGCCCGC
ATCCACATCGAGACCGCCCGCGAGGTGGGCAAGAGCTTCAAGGACCGCAA
GGAGATCGAGAAGCGCCAGGAGGAGAACCGCAAGGACCGCGAGAAGGCCG
CCGCCAAGTTCCGCGAGTACTTCCCCAACTTCGTGGGCGAGCCCAAGAGC
AAGGACATCCTGAAGCTGCGCCTGTACGAGCAGCAGCACGGCAAGTGCCT
GTACAGCGGCAAGGAGATCAACCTGGGCCGCCTGAACGAGAAGGGCTACG
TGGAGATCGACCACGCCCTGCCCTTCAGCCGCACCTGGGACGACAGCTTC
AACAACAAGGTGCTGGTGCTGGGCAGCGAGAACCAGAACAAGGGCAACCA
GACCCCCTACGAGTACTTCAACGGCAAGGACAACAGCCGCGAGTGGCAGG
AGTTCAAGGCCCGCGTGGAGACCAGCCGCTTCCCCCGCAGCAAGAAGCAG
CGCATCCTGCTGCAGAAGTTCGACGAGGACGGCTTCAAGGAGCGCAACCT
GAACGACACCCGCTACGTGAACCGCTTCCTGTGCCAGTTCGTGGCCGACC
GCATGCGCCTGACCGGCAAGGGCAAGAAGCGCGTGTTCGCCAGCAACGGC
CAGATCACCAACCTGCTGCGCGGCTTCTGGGGCCTGCGCAAGGTGCGCGC
CGAGAACGACCGCCACCACGCCCTGGACGCCGTGGTGGTGGCCTGCAGCA
CCGTGGCCATGCAGCAGAAGATCACCCGCTTCGTGCGCTACAAGGAGATG
AACGCCTTCGACGGTAAAACCATCGACAAGGAGACCGGCGAGGTGCTGCA
CCAGAAGACCCACTTCCCCCAGCCCTGGGAGTTCTTCGCCCAGGAGGTGA
TGATCCGCGTGTTCGGCAAGCCCGACGGCAAGCCCGAGTTCGAGGAGGCC
GACACCCCCGAGAAGCTGCGCACCCTGCTGGCCGAGAAGCTGAGCAGCCG
CCCTGAGGCCGTGCACGAGTACGTGACTCCTCTGTTCGTGAGCCGCGCCC
CCAACCGCAAGATGAGCGGTCAGGGTCACATGGAGACCGTGAAGAGCGCC
AAGCGCCTGGACGAGGGCGTGAGCGTGCTGCGCGTGCCCCTGACCCAGCT
GAAGCTGAAGGACCTGGAGAAGATGGTGAACCGCGAGCGCGAGCCCAAGC
TGTACGAGGCCCTGAAGGCCCGCCTGGAGGCCCACAAGGACGACCCCGCC
AAGGCCTTCGCCGAGCCCTTCTACAAGTACGACAAGGCCGGCAACCGCAC
CCAGCAGGTGAAGGCCGTGCGCGTGGAGCAGGTGCAGAAGACCGGCGTGT
GGGTGCGCAACCACAACGGCATCGCCGACAACGCCACCATGGTGCGCGTG
GACGTGTTCGAGAAGGGCGACAAGTACTACCTGGTGCCCATCTACAGCTG
GCAGGTGGCCAAGGGCATCCTGCCCGACCGCGCCGTGGTGCAGGGCAAGG
ACGAGGAGGACTGGCAGCTGATCGACGACAGCTTCAACTTCAAGTTCAGC
CTGCACCCCAACGACCTGGTGGAGGTGATCACCAAGAAGGCCCGCATGTT
CGGCTACTTCGCCAGCTGCCACCGCGGCACCGGCAACATCAACATCCGCA
TCCACGACCTGGACCACAAGATCGGCAAGAACGGCATCCTGGAGGGCATC
GGCGTGAAGACCGCCCTGAGCTTCCAGAAGTACCAGATCGACGAGCTGGG
CAAGGAGATCCGCCCCTGCCGCCTGAAGAAGCGCCCTCCTGTGCGCTAA

[0996] Provided below is the corresponding amino acid sequence of a N. meningitides Cas9 molecule.

(SEQ ID NO: 25)

MAAFKPNPINYILGLDIGIASVGWAMVEIDEDENPICLIDLGVRVFERAE
VPKTGDSLAMARRLARSVRRLTRRRAHRLLRARRLLKREGVLQAADFDEN
GLIKSLPNTPWQLRAAALDRKLTPLEWSAVLLHLIKHRGYLSQRKNEGET
ADKELGALLKGVADNAHALQTGDFRTPAELALNKFEKESGHIRNQRGDYS
HTFSRKDLQAELILLFEKQKEFGNPHVSGGLKEGIETLLMTQRPALSGDA
VQKMLGHCTFEPAEPKAAKNTYTAERFIWLTKLNNLRILEQGSERPLTDT
ERATLMDEPYRKSKLTYAQARKLLGLEDTAFFKGLRYGKDNAEASTLMEM
KAYHAISRALEKEGLKDKKSPLNLSPELQDEIGTAFSLFKTDEDITGRLK
DRIQPEILEALLKHISFDKFVQISLKALRRIVPLMEQGKRYDEACAEIYG
DHYGKKNTEEKIYLPPIPADEIRNPVVLRALSQARKVINGVVRRYGSPAR
IHIETAREVGKSFKDRKEIEKRQEENRKDREKAAAKFREYFPNFVGEPKS
KDILKLRLYEQQHGKCLYSGKEINLGRLNEKGYVEIDHALPFSRTWDDSF
NNKVLVLGSENQNKGNQTPYEYFNGKDNSREWQEFKARVETSRFPRSKKQ
RILLQKFDEDGFKERNLNDTRYVNRFLCQFVADRMRLTGKGKKRVFASNG
QITNLLRGFWGLRKVRAENDRHHALDAVVVACSTVAMQQKITRFVRYKEM
NAFDGKTIDKETGEVLHQKTHFPQPWEFFAQEVMIRVFGKPDGKPEFEEA
DTPEKLRTLLAEKLSSRPEAVHEYVTPLFVSRAPNRKMSGQGHMETVKSA
KRLDEGVSVLRVPLTQLKLKDLEKMVNREREPKLYEALKARLEAHKDDPA
KAFAEPFYKYDKAGNRTQQVKAVRVEQVQKTGVWVRNHNGIADNATMVRV
DVFEKGDKYYLVPIYSWQVAKGILPDRAVVQGKDEEDWQLIDDSFNFKFS
LHPNDLVEVITKKARMFGYFASCHRGTGNINIRIHDLDHKIGKNGILEGI
GVKTALSFQKYQIDELGKEIRPCRLKKRPPVR*

[0997] Provided below is an amino acid sequence of a S. aureus Cas9 molecule.

(SEQ ID NO: 26)

MKRNYILGLDIGITSVGYGIIDYETRDVIDAGVRLFKEANVENNEGRRSK
RGARRLKRRRRHRIQRVKKLLFDYNLLTDHSELSGINPYEARVKGLSQKL
SEEEFSAALLHLAKRRGVHNVNEVEEDTGNELSTKEQISRNSKALEEKYV
AELQLERLKKDGEVRGSINRFKTSDYVKEAKQLLKVQKAYHQLDQSFIDT
YIDLLETRRTYYEGPGEGSPFGWKDIKEWYEMLMGHCTYFPEELRSVKYA
YNADLYNALNDLNNLVITRDENEKLEYYEKFQIIENVFKQKKKPTLKQIA
KEILVNEEDIKGYRVTSTGKPEFTNLKVYHDIKDITARKEIIENAELLDQ
IAKILTIYQSSEDIQEELTNLNSELTQEEIEQISNLKGYTGTHNLSLKAI
NLILDELWHTNDNQIAIFNRLKLVPKKVDLSQQKEIPTTLVDDFILSPVV
KRSFIQSIKVINAIIKKYGLPNDIIIELAREKNSKDAQKMINEMQKRNRQ
TNERIEEIIRTTGKENAKYLIEKIKLHDMQEGKCLYSLEAIPLEDLLNNP
FNYEVDHIIPRSVSFDNSFNNKVLVKQEENSKKGNRTPFQYLSSSDSKIS
YETFKKHILNLAKGKGRISKTKKEYLLEERDINRFSVQKDFINRNLVDTR
YATRGLMNLLRSYFRVNNLDVKVKSINGGFTSFLRRKWKFKKERNKGYKH
HAEDALIIANADFIFKEWKKLDKAKKVMENQMFEEKQAESMPEIETEQEY
KEIFITPHQIKHIKDFKDYKYSHRVDKKPNRELINDTLYSTRKDDKGNTL
IVNNLNGLYDKDNDKLKKLINKSPEKLLMYHHDPQTYQKLKLIMEQYGDE
KNPLYKYYEETGNYLTKYSKKDNGPVIKKIKYYGNKLNAHLDITDDYPNS
RNKVVKLSLKPYRFDVYLDNGVYKFVTVKNLDVIKKENYYEVNSKCYEEA
KKLKKISNQAEFIASFYNNDLIKINGELYRVIGVNNDLLNRIEVNMIDIT
YREYLENMNDKRPPRIIKTIASKTQSIKKYSTDILGNLYEVKSKKHPQII
KKG*

[0998] Provided below is an exemplary codon optimized nucleic acid sequence encoding a Cas9 molecule of S. aureus Cas9.

(SEQ ID NO: 39)

ATGAAAAGGAACTACATTCTGGGGCTGGACATCGGGATTACAAGCGTGGG
GTATGGGATTATTGACTATGAAACAAGGGACGTGATCGACGCAGGCGTCA
GACTGTTCAAGGAGGCCAACGTGGAAAACAATGAGGGACGGAGAAGCAAG
AGGGGAGCCAGGCGCCTGAAACGACGGAGAAGGCACAGAATCCAGAGGGT
GAAGAAACTGCTGTTCGATTACAACCTGCTGACCGACCATTCTGAGCTGA
GTGGAATTAATCCTTATGAAGCCAGGGTGAAAGGCCTGAGTCAGAAGCTG
TCAGAGGAAGAGTTTTCCGCAGCTCTGCTGCACCTGGCTAAGCGCCGAGG
AGTGCATAACGTCAATGAGGTGGAAGAGGACACCGGCAACGAGCTGTCTA
CAAAGGAACAGATCTCACGCAATAGCAAAGCTCTGGAAGAGAAGTATGTC
GCAGAGCTGCAGCTGGAACGGCTGAAGAAAGATGGCGAGGTGAGAGGGTC
AATTAATAGGTTCAAGACAAGCGACTACGTCAAAGAAGCCAAGCAGCTGC
TGAAAGTGCAGAAGGCTTACCACCAGCTGGATCAGAGCTTCATCGATACT
TATATCGACCTGCTGGAGACTCGGAGAACCTACTATGAGGGACCAGGAGA
AGGGAGCCCCTTCGGATGGAAAGACATCAAGGAATGGTACGAGATGCTGA
TGGGACATTGCACCTATTTTCCAGAAGAGCTGAGAAGCGTCAAGTACGCT
TATAACGCAGATCTGTACAACGCCCTGAATGACCTGAACAACCTGGTCAT
CACCAGGGATGAAAACGAGAAACTGGAATACTATGAGAAGTTCCAGATCA
TCGAAAACGTGTTTAAGCAGAAGAAAAAGCCTACACTGAAACAGATTGCT
AAGGAGATCCTGGTCAACGAAGAGGACATCAAGGGCTACCGGGTGACAAG
CACTGGAAAACCAGAGTTCACCAATCTGAAAGTGTATCACGATATTAAGG
ACATCACAGCACGGAAAGAAATCATTGAGAACGCCGAACTGCTGGATCAG
ATTGCTAAGATCCTGACTATCTACCAGAGCTCCGAGGACATCCAGGAAGA
GCTGACTAACCTGAACAGCGAGCTGACCCAGGAAGAGATCGAACAGATTA
GTAATCTGAAGGGGTACACCGGAACACACAACCTGTCCCTGAAAGCTATC
AATCTGATTCTGGATGAGCTGTGGCATACAAACGACAATCAGATTGCAAT
CTTTAACCGGCTGAAGCTGGTCCCAAAAAAGGTGGACCTGAGTCAGCAGA
AAGAGATCCCAACCACACTGGTGGACGATTTCATTCTGTCACCCGTGGTC
AAGCGGAGCTTCATCCAGAGCATCAAAGTGATCAACGCCATCATCAAGAA
GTACGGCCTGCCCAATGATATCATTATCGAGCTGGCTAGGGAGAAGAACA
GCAAGGACGCACAGAAGATGATCAATGAGATGCAGAAACGAAACCGGCAG
ACCAATGAACGCATTGAAGAGATTATCCGAACTACCGGGAAAGAGAACGC
AAAGTACCTGATTGAAAAAATCAAGCTGCACGATATGCAGGAGGGAAAGT
GTCTGTATTCTCTGGAGGCCATCCCCCTGGAGGACCTGCTGAACAATCCA
TTCAACTACGAGGTCGATCATATTATCCCCAGAAGCGTGTCCTTCGACAA
TTCCTTTAACAACAAGGTGCTGGTCAAGCAGGAAGAGAACTCTAAAAAGG
GCAATAGGACTCCTTTCCAGTACCTGTCTAGTTCAGATTCCAAGATCTCT
TACGAAACCTTTAAAAAGCACATTCTGAATCTGGCCAAAGGAAAGGGCCG
CATCAGCAAGACCAAAAAGGAGTACCTGCTGGAAGAGCGGGACATCAACA
GATTCTCCGTCCAGAAGGATTTTATTAACCGGAATCTGGTGGACACAAGA
TACGCTACTCGCGGCCTGATGAATCTGCTGCGATCCTATTTCCGGGTGAA
CAATCTGGATGTGAAAGTCAAGTCCATCAACGGCGGGTTCACATCTTTTC
TGAGGCGCAAATGGAAGTTTAAAAAGGAGCGCAACAAAGGGTACAAGCAC
CATGCCGAAGATGCTCTGATTATCGCAAATGCCGACTTCATCTTTAAGGA
GTGGAAAAAGCTGGACAAAGCCAAGAAAGTGATGGAGAACCAGATGTTCG
AAGAGAAGCAGGCCGAATCTATGCCCGAAATCGAGACAGAACAGGAGTAC
AAGGAGATTTTCATCACTCCTCACCAGATCAAGCATATCAAGGATTTCAA
GGACTACAAGTACTCTCACCGGGTGGATAAAAAGCCCAACAGAGAGCTGA
TCAATGACACCCTGTATAGTACAAGAAAAGACGATAAGGGGAATACCCTG
ATTGTGAACAATCTGAACGGACTGTACGACAAAGATAATGACAAGCTGAA
AAAGCTGATCAACAAAAGTCCCGAGAAGCTGCTGATGTACCACCATGATC
CTCAGACATATCAGAAACTGAAGCTGATTATGGAGCAGTACGGCGACGAG
AAGAACCCACTGTATAAGTACTATGAAGAGACTGGGAACTACCTGACCAA
GTATAGCAAAAAGGATAATGGCCCCGTGATCAAGAAGATCAAGTACTATG
GGAACAAGCTGAATGCCCATCTGGACATCACAGACGATTACCCTAACAGT
CGCAACAAGGTGGTCAAGCTGTCACTGAAGCCATACAGATTCGATGTCTA
TCTGGACAACGGCGTGTATAAATTTGTGACTGTCAAGAATCTGGATGTCA
TCAAAAAGGAGAACTACTATGAAGTGAATAGCAAGTGCTACGAAGAGGCT
AAAAAGCTGAAAAAGATTAGCAACCAGGCAGAGTTCATCGCCTCCTTTTA
CAACAACGACCTGATTAAGATCAATGGCGAACTGTATAGGGTCATCGGGG
TGAACAATGATCTGCTGAACCGCATTGAAGTGAATATGATTGACATCACT
TACCGAGAGTATCTGGAAAACATGAATGATAAGCGCCCCCCTCGAATTAT
CAAAACAATTGCCTCTAAGACTCAGAGTATCAAAAAGTACTCAACCGACA
TTCTGGGAAACCTGTATGAGGTGAAGAGCAAAAAGCACCCTCAGATTATC
AAAAAGGGC

[0999] If any of the above Cas9 sequences are fused with a peptide or polypeptide at the C-terminus, it is understood that the stop codon will be removed.

[1000] Other Cas Molecules and Cas Polypeptides

[1001] Various types of Cas molecules or Cas polypeptides can be used to practice the inventions disclosed herein. In some embodiments, Cas molecules of Type II Cas systems are used. In other embodiments, Cas molecules of other Cas systems are used. For example, Type I or Type III Cas molecules may be used. Exemplary Cas molecules (and Cas systems) are described, e.g., in Haft et al., PLoS COMPUTATIONAL BIOLOGY 2005, 1(6): e60 and Makarova et al., NATURE REVIEW MICROBIOLOGY 2011, 9:467-477, the contents of both references are incorporated herein by reference in their entirety. Exemplary Cas molecules (and Cas systems) are also shown in Table 13.

TABLE 13
Cas Systems

| | | | Structure of | Families (and | |
|---|---|---|---|---|---|
| | | | encoded | superfamily) of | |
| Gene | System type | Name from | protein (PDB | encoded | |
| name^{‡} | or subtype | Haft et al.^{§} | accessions)^{¶} | protein^{#}** | Representatives |
| cas1 | Type I | cas1 | 3GOD, 3LFX | COG1518 | SERP2463, SPy1047 |
| | Type II | | and 2YZS | | and ygbT |
| | Type III | | | | |
| cas2 | Type I | cas2 | 2IVY, 2I8E and | COG1343 and | SERP2462, SPy1048, |
| | Type II | | 3EXC | COG3512 | SPy1723 (N-terminal |
| | Type III | | | | domain) and ygbF |
| cas3′ | Type I^{‡‡} | cas3 | NA | COG1203 | APE1232 and ygcB |
| cas3″ | Subtype I-A | NA | NA | COG2254 | APE1231 and |
| | Subtype I-B | | | | BH0336 |
| cas4 | Subtype I-A | cas4 and csa1 | NA | COG1468 | APE1239 and |
| | Subtype I-B | | | | BH0340 |
| | Subtype I-C | | | | |
| | Subtype I-D | | | | |
| | Subtype II-B | | | | |
| cas5 | Subtype I-A | cas5a, cas5d, | 3KG4 | COG1688 | APE1234, BH0337, |
| | Subtype I-B | cas5e, cas5h, | | (RAMP) | devS and ygcI |
| | Subtype I-C | cas5p, cas5t | | | |
| | Subtype I-E | and cmx5 | | | |
| cas6 | Subtype I-A | cas6 and cmx6 | 3I4H | COG1583 and | PF1131 and slr7014 |
| | Subtype I-B | | | COG5551 | |
| | Subtype I-D | | | (RAMP) | |
| | Subtype III- | | | | |
| | A Subtype | | | | |
| | III-B | | | | |
| cas6e | Subtype I-E | cse3 | 1WJ9 | (RAMP) | ygcH |
| cas6f | Subtype I-F | csy4 | 2XLJ | (RAMP) | y1727 |
| cas7 | Subtype I-A | csa2, csd2, | NA | COG1857 and | devR and ygcJ |
| | Subtype I-B | cse4, csh2, | | COG3649 | |
| | Subtype I-C | csp1 and cst2 | | (RAMP) | |
| | Subtype I-E | | | | |
| cas8a1 | Subtype I- | cmx1, cst1, | NA | BH0338-like | LA3191^{§§} and |
| | A^{‡‡} | csx8, csx13 | | | PG2018^{§§} |
| | | and CXXC- | | | |
| | | CXXC | | | |
| cas8a2 | Subtype I- | csa4 and csx9 | NA | PH0918 | AF0070, AF1873, |
| | A^{‡‡} | | | | MJ0385, PF0637, |
| | | | | | PH0918 and |
| | | | | | SSO1401 |
| cas8b | Subtype I- | csh1 and | NA | BH0338-like | MTH1090 and |
| | B^{‡‡} | TM1802 | | | TM1802 |
| cas8c | Subtype I- | csd1 and csp2 | NA | BH0338-like | BH0338 |
| | C^{‡‡} | | | | |
| cas9 | Type II^{‡‡} | csn1 and csx12 | NA | COG3513 | FTN_0757 and |
| | | | | | SPy1046 |
| cas10 | Type III^{‡‡} | cmr2, csm1 | NA | COG1353 | MTH326, Rv2823c^{§§} |
| | | and csx11 | | | and TM1794^{§§} |
| cas10d | Subtype I- | csc3 | NA | COG1353 | slr7011 |
| | D^{‡‡} | | | | |
| csy1 | Subtype I- | csy1 | NA | y1724-like | y1724 |
| | F^{‡‡} | | | | |
| csy2 | Subtype I-F | csy2 | NA | (RAMP) | y1725 |
| csy3 | Subtype I-F | csy3 | NA | (RAMP) | y1726 |
| cse1 | Subtype I- | cse1 | NA | YgcL-like | ygcL |
| | E^{‡‡} | | | | |
| cse2 | Subtype I-E | cse2 | 2ZCA | YgcK-like | ygcK |
| csc1 | Subtype I-D | csc1 | NA | alr1563-like | alr1563 |
| | | | | (RAMP) | |
| csc2 | Subtype I-D | csc1 and csc2 | NA | COG1337 | slr7012 |
| | | | | (RAMP) | |
| csa5 | Subtype I-A | csa5 | NA | AF1870 | AF1870, MJ0380, |
| | | | | | PF0643 and |
| | | | | | SSO1398 |
| csn2 | Subtype II-A | csn2 | NA | SPy1049-like | SPy1049 |
| csm2 | Subtype III- | csm2 | NA | COG1421 | MTH1081 and |
| | A^{‡‡} | | | | SERP2460 |
| csm3 | Subtype III-A | csc2 and csm3 | NA | COG1337 | MTH1080 and |
| | | | | (RAMP) | SERP2459 |
| csm4 | Subtype III-A | csm4 | NA | COG1567 | MTH1079 and |
| | | | | (RAMP) | SERP2458 |
| csm5 | Subtype III-A | csm5 | NA | COG1332 | MTH1078 and |
| | | | | (RAMP) | SERP2457 |
| csm6 | Subtype III-A | APE2256 and | 2WTE | COG1517 | APE2256 and |
| | | csm6 | | | SSO1445 |
| cmr1 | Subtype III-B | cmr1 | NA | COG1367 | PF1130 |
| | | | | (RAMP) | |
| cmr3 | Subtype III-B | cmr3 | NA | COG1769 | PF1128 |
| | | | | (RAMP) | |
| cmr4 | Subtype III-B | cmr4 | NA | COG1336 | PF1126 |
| | | | | (RAMP) | |
| cmr5 | Subtype III- | cmr5 | 2ZOP and | COG3337 | MTH324 and |
| | B^{‡‡} | | 2OEB | | PF1125 |
| cmr6 | Subtype III-B | cmr6 | NA | COG1604 | PF1124 |
| | | | | (RAMP) | |
| csb1 | Subtype I-U | GSU0053 | NA | (RAMP) | Balac_1306 and |
| | | | | | GSU0053 |
| csb2 | Subtype I- | NA | NA | (RAMP) | Balac_1305 and |
| | U^{§§} | | | | GSU0054 |
| csb3 | Subtype I-U | NA | NA | (RAMP) | Balac_1303^{§§} |
| csx17 | Subtype I-U | NA | NA | NA | Btus_2683 |
| csx14 | Subtype I-U | NA | NA | NA | GSU0052 |
| csx10 | Subtype I-U | csx10 | NA | (RAMP) | Caur_2274 |
| csx16 | Subtype III-U | VVA1548 | NA | NA | VVA1548 |
| csaX | Subtype III-U | csaX | NA | NA | SSO1438 |
| csx3 | Subtype III-U | csx3 | NA | NA | AF1864 |
| csx1 | Subtype III-U | csa3, csx1, | 1XMX and | COG1517 and | MJ1666, NE0113, |
| | | csx2, DXTHG, | 2I71 | COG4006 | PF1127 and TM1812 |
| | | NE0113 and | | | |
| | | TIGR02710 | | | |
| csx15 | Unknown | NA | NA | TTE2665 | TTE2665 |
| csf1 | Type U | csf1 | NA | NA | AFE_1038 |
| csf2 | Type U | csf2 | NA | (RAMP) | AFE_1039 |
| csf3 | Type U | csf3 | NA | (RAMP) | AFE_1040 |
| csf4 | Type U | csf4 | NA | NA | AFE_1037 |

### IV. Functional Analysis of Candidate Molecules

[1002] Candidate Cas9 molecules, candidate gRNA molecules, candidate Cas9 molecule/gRNA molecule complexes, can be evaluated by art-known methods or as described herein. For example, exemplary methods for evaluating the endonuclease activity of Cas9 molecule are described, e.g., in Jinek et al., SCIENCE 2012, 337(6096):816-821.

[1003] Binding and Cleavage Assay: Testing the Endonuclease Activity of Cas9 Molecule

[1004] The ability of a Cas9 molecule/gRNA molecule complex to bind to and cleave a target nucleic acid can be evaluated in a plasmid cleavage assay. In this assay, synthetic or in vitro-transcribed gRNA molecule is pre-annealed prior to the reaction by heating to 95° C. and slowly cooling down to room temperature. Native or restriction digest-linearized plasmid DNA (300 ng (˜8 nM)) is incubated for 60 min at 37° C. with purified Cas9 protein molecule (50-500 nM) and gRNA (50-500 nM, 1:1) in a Cas9 plasmid cleavage buffer (20 mM HEPES pH 7.5, 150 mM KCl, 0.5 mM DTT, 0.1 mM EDTA) with or without 10 mM MgCl₂. The reactions are stopped with 5×DNA loading buffer (30% glycerol, 1.2% SDS, 250 mM EDTA), resolved by a 0.8 or 1% agarose gel electrophoresis and visualized by ethidium bromide staining. The resulting cleavage products indicate whether the Cas9 molecule cleaves both DNA strands, or only one of the two strands. For example, linear DNA products indicate the cleavage of both DNA strands. Nicked open circular products indicate that only one of the two strands is cleaved.

[1005] Alternatively, the ability of a Cas9 molecule/gRNA molecule complex to bind to and cleave a target nucleic acid can be evaluated in an oligonucleotide DNA cleavage assay. In this assay, DNA oligonucleotides (10 pmol) are radiolabeled by incubating with 5 units T4 polynucleotide kinase and ˜3-6 pmol (˜20-40 mCi) [γ-32P]-ATP in 1×T4 polynucleotide kinase reaction buffer at 37° C. for 30 min, in a 50 μL reaction. After heat inactivation (65° C. for 20 min), reactions are purified through a column to remove unincorporated label. Duplex substrates (100 nM) are generated by annealing labeled oligonucleotides with equimolar amounts of unlabeled complementary oligonucleotide at 95° C. for 3 min, followed by slow cooling to room temperature. For cleavage assays, gRNA molecules are annealed by heating to 95° C. for 30 s, followed by slow cooling to room temperature. Cas9 (500 nM final concentration) is pre-incubated with the annealed gRNA molecules (500 nM) in cleavage assay buffer (20 mM HEPES pH 7.5, 100 mM KCl, 5 mM MgCl2, 1 mM DTT, 5% glycerol) in a total volume of 9 μl. Reactions are initiated by the addition of 1 μl target DNA (10 nM) and incubated for 1 h at 37° C. Reactions are quenched by the addition of 20 μl of loading dye (5 mM EDTA, 0.025% SDS, 5% glycerol in formamide) and heated to 95° C. for 5 min. Cleavage products are resolved on 12% denaturing polyacrylamide gels containing 7 M urea and visualized by phosphor imaging. The resulting cleavage products indicate that whether the complementary strand, the non-complementary strand, or both, are cleaved.

[1006] One or both of these assays can be used to evaluate the suitability of a candidate gRNA molecule or candidate Cas9 molecule.

[1007] Binding Assay: Testing the Binding of Cas9 Molecule to Target DNA

[1008] Exemplary methods for evaluating the binding of Cas9 molecule to target DNA are described, e.g., in Jinek et al., SCIENCE 2012; 337(6096):816-821.

[1009] For example, in an electrophoretic mobility shift assay, target DNA duplexes are formed by mixing of each strand (10 nmol) in deionized water, heating to 95° C. for 3 min and slow cooling to room temperature. All DNAs are purified on 8% native gels containing 1×TBE. DNA bands are visualized by UV shadowing, excised, and eluted by soaking gel pieces in DEPC-treated H₂O. Eluted DNA is ethanol precipitated and dissolved in DEPC-treated H₂O. DNA samples are 5′ end labeled with [γ-32P]-ATP using T4 polynucleotide kinase for 30 min at 37° C. Polynucleotide kinase is heat denatured at 65° C. for 20 min, and unincorporated radiolabel is removed using a column. Binding assays are performed in buffer containing 20 mM HEPES pH 7.5, 100 mM KCl, 5 mM MgCl₂, 1 mM DTT and 10% glycerol in a total volume of 10 μl. Cas9 protein molecule is programmed with equimolar amounts of pre-annealed gRNA molecule and titrated from 100 pM to 1 μM. Radiolabeled DNA is added to a final concentration of 20 pM. Samples are incubated for 1 h at 37° C. and resolved at 4° C. on an 8% native polyacrylamide gel containing 1×TBE and 5 mM MgCl₂. Gels are dried and DNA visualized by phosphor imaging.

[1010] Differential Scanning Flourimetry (DSF)

[1011] The thermostability of Cas9-gRNA ribonucleoprotein (RNP) complexes can be measured via DSF. This technique measures the thermostability of a protein, which can increase under favorable conditions such as the addition of a binding RNA molecule, e.g., a gRNA.

[1012] The assay is performed using two different protocols, one to test the best stoichiometric ratio of gRNA:Cas9 protein and another to determine the best solution conditions for RNP formation.

[1013] To determine the best solution to form RNP complexes, a 2 uM solution of Cas9 in water+10× SYPRO Orange® (Life Technologies cat#S-6650) and dispensed into a 384 well plate. An equimolar amount of gRNA diluted in solutions with varied pH and salt is then added. After incubating at room temperature for 10′ and brief centrifugation to remove any bubbles, a Bio-Rad CFX384™ Real-Time System C1000 Touch™ Thermal Cycler with the Bio-Rad CFX Manager software is used to run a gradient from 20° C. to 90° C. with a 1° increase in temperature every 10 seconds.

[1014] The second assay consists of mixing various concentrations of gRNA with 2 uM Cas9 in optimal buffer from assay 1 above and incubating at RT for 10′ in a 384 well plate. An equal volume of optimal buffer+10× SYPRO Orange® (Life Technologies cat#S-6650) is added and the plate sealed with Microseal® B adhesive (MSB-1001). Following brief centrifugation to remove any bubbles, a Bio-Rad CFX384™ Real-Time System C1000 Touch™ Thermal Cycler with the Bio-Rad CFX Manager software is used to run a gradient from 20° C. to 90° C. with a 1° increase in temperature every 10 seconds.

### V. Genome Editing Approaches

[1015] Described herein are methods for targeted knockout of the CCR5 gene, e.g., one or both alleles of the CCR5 gene, e.g., using one or more of the approaches or pathways described herein, e.g., using NHEJ. Described herein are also methods for targeted knockdown of the CCR5 gene.

[1016] V.1 NHEJ Approaches for Gene Targeting

[1017] As described herein, nuclease-induced non-homologous end-joining (NHEJ) can be used to target gene-specific knockouts. Nuclease-induced NHEJ can also be used to remove (e.g., delete) sequence insertions in a gene of interest.

[1018] While not wishing to be bound by theory, it is believed that, in an embodiment, the genomic alterations associated with the methods described herein rely on nuclease-induced NHEJ and the error-prone nature of the NHEJ repair pathway. NHEJ repairs a double-strand break in the DNA by joining together the two ends; however, generally, the original sequence is restored only if two compatible ends, exactly as they were formed by the double-strand break, are perfectly ligated. The DNA ends of the double-strand break are frequently the subject of enzymatic processing, resulting in the addition or removal of nucleotides, at one or both strands, prior to rejoining of the ends. This results in the presence of insertion and/or deletion (indel) mutations in the DNA sequence at the site of the NHEJ repair. Two-thirds of these mutations typically alter the reading frame and, therefore, produce a non-functional protein. Additionally, mutations that maintain the reading frame, but which insert or delete a significant amount of sequence, can destroy functionality of the protein. This is locus dependent as mutations in critical functional domains are likely less tolerable than mutations in non-critical regions of the protein.

[1019] The indel mutations generated by NHEJ are unpredictable in nature; however, at a given break site certain indel sequences are favored and are over represented in the population, likely due to small regions of microhomology. The lengths of deletions can vary widely; most commonly in the 1-50 bp range, but they can easily reach greater than 100-200 bp. Insertions tend to be shorter and often include short duplications of the sequence immediately surrounding the break site. However, it is possible to obtain large insertions, and in these cases, the inserted sequence has often been traced to other regions of the genome or to plasmid DNA present in the cells.

[1020] Because NHEJ is a mutagenic process, it can also be used to delete small sequence motifs as long as the generation of a specific final sequence is not required. If a double-strand break is targeted near to a short target sequence, the deletion mutations caused by the NHEJ repair often span, and therefore remove, the unwanted nucleotides. For the deletion of larger DNA segments, introducing two double-strand breaks, one on each side of the sequence, can result in NHEJ between the ends with removal of the entire intervening sequence. Both of these approaches can be used to delete specific DNA sequences; however, the error-prone nature of NHEJ may still produce indel mutations at the site of repair.

[1021] Both double strand cleaving eaCas9 molecules and single strand, or nickase, eaCas9 molecules can be used in the methods and compositions described herein to generate NHEJ-mediated indels. NHEJ-mediated indels targeted to the early coding region of a gene of interest can be used to knockout (i.e., eliminate expression of) a gene of interest. For example, early coding region of a gene of interest includes sequence immediately following a transcription start site, within a first exon of the coding sequence, or within 500 bp of the transcription start site (e.g., less than 500, 450, 400, 350, 300, 250, 200, 150, 100 or 50 bp).

[1022] Placement of Double Strand or Single Strand Breaks Relative to the Target Position

[1023] In an embodiment, in which a gRNA and Cas9 nuclease generate a double strand break for the purpose of inducing NHEJ-mediated indels, a gRNA, e.g., a unimolecular (or chimeric) or modular gRNA molecule, is configured to position one double-strand break in close proximity to a nucleotide of the target position. In an embodiment, the cleavage site is between 0-30 bp away from the target position (e.g., less than 30, 25, 20, 15, 10, 9, 8, 7, 6, 5, 4, 3, 2 or 1 bp from the target position).

[1024] In an embodiment, in which two gRNAs complexing with Cas9 nickases induce two single strand breaks for the purpose of inducing NHEJ-mediated indels, two gRNAs, e.g., independently, unimolecular (or chimeric) or modular gRNA, are configured to position two single-strand breaks to provide for NHEJ repair a nucleotide of the target position. In an embodiment, the gRNAs are configured to position cuts at the same position, or within a few nucleotides of one another, on different strands, essentially mimicking a double strand break. In an embodiment, the closer nick is between 0-30 bp away from the target position (e.g., less than 30, 25, 20, 15, 10, 9, 8, 7, 6, 5, 4, 3, 2 or 1 bp from the target position), and the two nicks are within 25-55 bp of each other (e.g., between 25 to 50, 25 to 45, 25 to 40, 25 to 35, 25 to 30, 50 to 55, 45 to 55, 40 to 55, 35 to 55, 30 to 55, 30 to 50, 35 to 50, 40 to 50, 45 to 50, 35 to 45, or 40 to 45 bp) and no more than 100 bp away from each other (e.g., no more than 90, 80, 70, 60, 50, 40, 30, 20 or 10 bp). In an embodiment, the gRNAs are configured to place a single strand break on either side of a nucleotide of the target position.

[1025] Both double strand cleaving eaCas9 molecules and single strand, or nickase, eaCas9 molecules can be used in the methods and compositions described herein to generate breaks both sides of a target position. Double strand or paired single strand breaks may be generated on both sides of a target position to remove the nucleic acid sequence between the two cuts (e.g., the region between the two breaks in deleted). In one embodiment, two gRNAs, e.g., independently, unimolecular (or chimeric) or modular gRNA, are configured to position a double-strand break on both sides of a target position. In an alternate embodiment, three gRNAs, e.g., independently, unimolecular (or chimeric) or modular gRNA, are configured to position a double strand break (i.e., one gRNA complexes with a cas9 nuclease) and two single strand breaks or paired single stranded breaks (i.e., two gRNAs complex with Cas9 nickases) on either side of the target position. In another embodiment, four gRNAs, e.g., independently, unimolecular (or chimeric) or modular gRNA, are configured to generate two pairs of single stranded breaks (i.e., two pairs of two gRNAs complex with Cas9 nickases) on either side of the target position. The double strand break(s) or the closer of the two single strand nicks in a pair will ideally be within 0-500 bp of the target position (e.g., no more than 450, 400, 350, 300, 250, 200, 150, 100, 50 or 25 bp from the target position). When nickases are used, the two nicks in a pair are within 25-55 bp of each other (e.g., between 25 to 50, 25 to 45, 25 to 40, 25 to 35, 25 to 30, 50 to 55, 45 to 55, 40 to 55, 35 to 55, 30 to 55, 30 to 50, 35 to 50, 40 to 50, 45 to 50, 35 to 45, or 40 to 45 bp) and no more than 100 bp away from each other (e.g., no more than 90, 80, 70, 60, 50, 40, 30, 20 or 10 bp).

[1026] V.2 Single-Strand Annealing

[1027] Single strand annealing (SSA) is another DNA repair process that repairs a double-strand break between two repeat sequences present in a target nucleic acid. Repeat sequences utilized by the SSA pathway are generally greater than 30 nucleotides in length. Resection at the break ends occurs to reveal repeat sequences on both strands of the target nucleic acid. After resection, single strand overhangs containing the repeat sequences are coated with RPA protein to prevent the repeats sequences from inappropriate annealing, e.g., to themselves. RAD52 binds to and each of the repeat sequences on the overhangs and aligns the sequences to enable the annealing of the complementary repeat sequences. After annealing, the single-strand flaps of the overhangs are cleaved. New DNA synthesis fills in any gaps, and ligation restores the DNA duplex. As a result of the processing, the DNA sequence between the two repeats is deleted. The length of the deletion can depend on many factors including the location of the two repeats utilized, and the pathway or processivity of the resection.

[1028] In contrast to HDR pathways, SSA does not require a template nucleic acid to alter or correct a target nucleic acid sequence. Instead, the complementary repeat sequence is utilized.

[1029] V.3 Other DNA Repair Pathways

[1030] SSBR (Single Strand Break Repair)

[1031] Single-stranded breaks (SSB) in the genome are repaired by the SSBR pathway, which is a distinct mechanism from the DSB repair mechanisms discussed above. The SSBR pathway has four major stages: SSB detection, DNA end processing, DNA gap filling, and DNA ligation. A more detailed explanation is given in Caldecott, Nature Reviews Genetics 9, 619-631 (August 2008), and a summary is given here.

[1032] In the first stage, when a SSB forms, PARP1 and/or PARP2 recognize the break and recruit repair machinery. The binding and activity of PARP1 at DNA breaks is transient and it seems to accelerate SSBr by promoting the focal accumulation or stability of SSBr protein complexes at the lesion. Arguably the most important of these SSBr proteins is XRCC1, which functions as a molecular scaffold that interacts with, stabilizes, and stimulates multiple enzymatic components of the SSBr process including the protein responsible for cleaning the DNA 3′ and 5′ ends. For instance, XRCC1 interacts with several proteins (DNA polymerase beta, PNK, and three nucleases, APE1, APTX, and APLF) that promote end processing. APE1 has endonuclease activity. APLF exhibits endonuclease and 3′ to 5′ exonuclease activities. APTX has endonuclease and 3′ to 5′ exonuclease activity.

[1033] This end processing is an important stage of SSBR since the 3′- and/or 5′-termini of most, if not all, SSBs are ‘damaged’. End processing generally involves restoring a damaged 3′-end to a hydroxylated state and and/or a damaged 5′ end to a phosphate moiety, so that the ends become ligation-competent. Enzymes that can process damaged 3′ termini include PNKP, APE1, and TDP1. Enzymes that can process damaged 5′ termini include PNKP, DNA polymerase beta, and APTX. LIG3 (DNA ligase III) can also participate in end processing. Once the ends are cleaned, gap filling can occur.

[1034] At the DNA gap filling stage, the proteins typically present are PARP1, DNA polymerase beta, XRCC1, FEN1 (flap endonuclease 1), DNA polymerase delta/epsilon, PCNA, and LIG1. There are two ways of gap filling, the short patch repair and the long patch repair. Short patch repair involves the insertion of a single nucleotide that is missing. At some SSBs, “gap filling” might continue displacing two or more nucleotides (displacement of up to 12 bases have been reported). FEN1 is an endonuclease that removes the displaced 5′-residues. Multiple DNA polymerases, including Pol β, are involved in the repair of SSBs, with the choice of DNA polymerase influenced by the source and type of SSB.

[1035] In the fourth stage, a DNA ligase such as LIG1 (Ligase I) or LIG3 (Ligase III) catalyzes joining of the ends. Short patch repair uses Ligase III and long patch repair uses Ligase I.

[1036] Sometimes, SSBR is replication-coupled. This pathway can involve one or more of CtIP, MRN, ERCC1, and FEN1. Additional factors that may promote SSBR include: aPARP, PARP1, PARP2, PARG, XRCC1, DNA polymerase b, DNA polymerase d, DNA polymerase e, PCNA, LIG1, PNK, PNKP, APE1, APTX, APLF, TDP1, LIG3, FEN1, CtIP, MRN, and ERCC1.

[1037] MMR (Mismatch Repair)

[1038] Cells contain three excision repair pathways: MMR, BER, and NER. The excision repair pathways have a common feature in that they typically recognize a lesion on one strand of the DNA, then exo/endonucleases remove the lesion and leave a 1-30 nucleotide gap that is sub-sequentially filled in by DNA polymerase and finally sealed with ligase. A more complete picture is given in Li, Cell Research (2008) 18:85-98, and a summary is provided here.

[1039] Mismatch repair (MMR) operates on mispaired DNA bases.

[1040] The MSH2/6 or MSH2/3 complexes both have ATPases activity that plays an important role in mismatch recognition and the initiation of repair. MSH2/6 preferentially recognizes base-base mismatches and identifies mispairs of 1 or 2 nucleotides, while MSH2/3 preferentially recognizes larger ID mispairs.

[1041] hMLH1 heterodimerizes with hPMS2 to form hMutL α which possesses an ATPase activity and is important for multiple steps of MMR. It possesses a PCNA/replication factor C (RFC)-dependent endonuclease activity which plays an important role in 3′ nick-directed MMR involving EXO1. (EXO1 is a participant in both HR and MMR.) It regulates termination of mismatch-provoked excision. Ligase I is the relevant ligase for this pathway. Additional factors that may promote MMR include: EXO1, MSH2, MSH3, MSH6, MLH1, PMS2, MLH3, DNA Pol d, RPA, HMGB1, RFC, and DNA ligase I.

[1042] Base Excision Repair (BER)

[1043] The base excision repair (BER) pathway is active throughout the cell cycle; it is responsible primarily for removing small, non-helix-distorting base lesions from the genome. In contrast, the related Nucleotide Excision Repair pathway (discussed in the next section) repairs bulky helix-distorting lesions. A more detailed explanation is given in Caldecott, Nature Reviews Genetics 9, 619-631 (August 2008), and a summary is given here.

[1044] Upon DNA base damage, base excision repair (BER) is initiated and the process can be simplified into five major steps: (a) removal of the damaged DNA base; (b) incision of the subsequent a basic site; (c) clean-up of the DNA ends; (d) insertion of the correct nucleotide into the repair gap; and (e) ligation of the remaining nick in the DNA backbone. These last steps are similar to the SSBR.

[1045] In the first step, a damage-specific DNA glycosylase excises the damaged base through cleavage of the N-glycosidic bond linking the base to the sugar phosphate backbone. Then AP endonuclease-1 (APE1) or bifunctional DNA glycosylases with an associated lyase activity incised the phosphodiester backbone to create a DNA single strand break (SSB). The third step of BER involves cleaning-up of the DNA ends. The fourth step in BER is conducted by Pol that adds a new complementary nucleotide into the repair gap and in the final step XRCC1/Ligase III seals the remaining nick in the DNA backbone. This completes the short-patch BER pathway in which the majority (˜80%) of damaged DNA bases are repaired. However, if the 5′-ends in step 3 are resistant to end processing activity, following one nucleotide insertion by Pol β there is then a polymerase switch to the replicative DNA polymerases, Pol δ/ε, which then add ˜2-8 more nucleotides into the DNA repair gap. This creates a 5′-flap structure, which is recognized and excised by flap endonuclease-1 (FEN-1) in association with the processivity factor proliferating cell nuclear antigen (PCNA). DNA ligase I then seals the remaining nick in the DNA backbone and completes long-patch BER. Additional factors that may promote the BER pathway include: DNA glycosylase, APE1, Polb, Pold, Pole, XRCC1, Ligase III, FEN-1, PCNA, RECQL4, WRN, MYH, PNKP, and APTX.

[1046] Nucleotide Excision Repair (NER)

[1047] Nucleotide excision repair (NER) is an important excision mechanism that removes bulky helix-distorting lesions from DNA. Additional details about NER are given in Marteijn et al., Nature Reviews Molecular Cell Biology 15, 465-481 (2014), and a summary is given here. NER a broad pathway encompassing two smaller pathways: global genomic NER (GG-NER) and transcription coupled repair NER (TC-NER). GG-NER and TC-NER use different factors for recognizing DNA damage. However, they utilize the same machinery for lesion incision, repair, and ligation.

[1048] Once damage is recognized, the cell removes a short single-stranded DNA segment that contains the lesion. Endonucleases XPF/ERCC1 and XPG (encoded by ERCC5) remove the lesion by cutting the damaged strand on either side of the lesion, resulting in a single-strand gap of 22-30 nucleotides. Next, the cell performs DNA gap filling synthesis and ligation. Involved in this process are: PCNA, RFC, DNA Pol δ, DNA Pol ε or DNA Pol κ, and DNA ligase I or XRCC1/Ligase III. Replicating cells tend to use DNA pol ε and DNA ligase I, while non-replicating cells tend to use DNA Pol δ, DNA Pol κ, and the XRCC1/Ligase III complex to perform the ligation step.

[1049] NER can involve the following factors: XPA-G, POLH, XPF, ERCC1, XPA-G, and LIG1. Transcription-coupled NER (TC-NER) can involve the following factors: CSA, CSB, XPB, XPD, XPG, ERCC1, and TTDA. Additional factors that may promote the NER repair pathway include XPA-G, POLH, XPF, ERCC1, XPA-G, LIG1, CSA, CSB, XPA, XPB, XPC, XPD, XPF, XPG, TTDA, UVSSA, USP7, CETN2, RAD23B, UV-DDB, CAK subcomplex, RPA, and PCNA.

[1050] Interstrand Crosslink (ICL)

[1051] A dedicated pathway called the ICL repair pathway repairs interstrand crosslinks. Interstrand crosslinks, or covalent crosslinks between bases in different DNA strand, can occur during replication or transcription. ICL repair involves the coordination of multiple repair processes, in particular, nucleolytic activity, translesion synthesis (TLS), and HDR. Nucleases are recruited to excise the ICL on either side of the crosslinked bases, while TLS and HDR are coordinated to repair the cut strands. ICL repair can involve the following factors: endonucleases, e.g., XPF and RAD51C, endonucleases such as RAD51, translesion polymerases, e.g., DNA polymerase zeta and Rev1), and the Fanconi anemia (FA) proteins, e.g., FancJ.

[1052] Other Pathways

[1053] Several other DNA repair pathways exist in mammals.

[1054] Translesion synthesis (TLS) is a pathway for repairing a single stranded break left after a defective replication event and involves translesion polymerases, e.g., DNA polζ and Rev1.

[1055] Error-free postreplication repair (PRR) is another pathway for repairing a single stranded break left after a defective replication event.

[1056] V.4 Targeted Knockdown

[1057] Unlike CRISPR/Cas-mediated gene knockout, which permanently eliminates expression by mutating the gene at the DNA level, CRISPR/Cas knockdown allows for temporary reduction of gene expression through the use of artificial transcription factors. Mutating key residues in both DNA cleavage domains of the Cas9 protein (e.g. the D10A and H840A mutations) results in the generation of a catalytically inactive Cas9 (eiCas9 which is also known as dead Cas9 or dCas9) molecule. A catalytically inactive Cas9 complexes with a gRNA and localizes to the DNA sequence specified by that gRNA's targeting domain, however, it does not cleave the target DNA. Fusion of the dCas9 to an effector domain, e.g., a transcription repression domain, enables recruitment of the effector to any DNA site specified by the gRNA. Although an enzymatically inactive (eiCas9) Cas9 molecule itself can block transcription when recruited to early regions in the coding sequence, more robust repression can be achieved by fusing a transcriptional repression domain (for example KRAB, SID or ERD) to the Cas9 and recruiting it to the target knockdown position, e.g., within 1000 bp of sequence 3′ of the start codon or within 500 bp of a promoter region 5′ of the start codon of a gene. It is likely that targeting DNAseI hypersensitive sites (DHSs) of the promoter may yield more efficient gene repression or activation because these regions are more likely to be accessible to the Cas9 protein and are also more likely to harbor sites for endogenous transcription factors. Especially for gene repression, it is contemplated herein that blocking the binding site of an endogenous transcription factor would aid in downregulating gene expression. In an embodiment, one or more eiCas9 molecules may be used to block binding of one or more endogenous transcription factors. In another embodiment, an eiCas9 molecule can be fused to a chromatin modifying protein. Altering chromatin status can result in decreased expression of the target gene. One or more eiCas9 molecules fused to one or more chromatin modifying proteins may be used to alter chromatin status.

[1058] In an embodiment, a gRNA molecule can be targeted to a known transcription response elements (e.g., promoters, enhancers, etc.), a known upstream activating sequences (UAS), and/or sequences of unknown or known function that are suspected of being able to control expression of the target DNA.

[1059] CRISPR/Cas-mediated gene knockdown can be used to reduce expression of an unwanted allele or transcript. Contemplated herein are scenarios wherein permanent destruction of the gene is not ideal. In these scenarios, site-specific repression may be used to temporarily reduce or eliminate expression. It is also contemplated herein that the off-target effects of a Cas-repressor may be less severe than those of a Cas-nuclease as a nuclease can cleave any DNA sequence and cause mutations whereas a Cas-repressor may only have an effect if it targets the promoter region of an actively transcribed gene. However, while nuclease-mediated knockout is permanent, repression may only persist as long as the Cas-repressor is present in the cells. Once the repressor is no longer present, it is likely that endogenous transcription factors and gene regulatory elements would restore expression to its natural state.

[1060] V.5 Examples of gRNAs in Genome Editing Methods

[1061] gRNA molecules as described herein can be used with Cas9 molecules that generate a double strand break or a single strand break to alter the sequence of a target nucleic acid, e.g., a target position or target genetic signature. gRNA molecules useful in these methods are described below.

[1062] In an embodiment, the gRNA, e.g., a chimeric gRNA, is configured such that it comprises one or more of the following properties;

[1063] a) it can position, e.g., when targeting a Cas9 molecule that makes double strand breaks, a double strand break (i) within 50, 100, 150, 200, 250, 300, 350, 400, 450, or 500 nucleotides of a target position, or (ii) sufficiently close that the target position is within the region of end resection;

[1064] b) it has a targeting domain of at least 16 nucleotides, e.g., a targeting domain of (i) 16, (ii), 17, (iii) 18, (iv) 19, (v) 20, (vi) 21, (vii) 22, (viii) 23, (ix) 24, (x) 25, or (xi) 26 nucleotides; and

[1065] c)
[1066] (i) the proximal and tail domain, when taken together, comprise at least 15, 18, 20, 25, 30, 31, 35, 40, 45, 49, 50, or 53 nucleotides, e.g., at least 15, 18, 20, 25, 30, 31, 35, 40, 45, 49, 50, or 53 nucleotides from a naturally occurring S. pyogenes, S. thermophilus, S. aureus, or N. meningitidis tail and proximal domain, or a sequence that differs by no more than 1, 2, 3, 4, 5; 6, 7, 8, 9 or 10 nucleotides therefrom;
[1067] (ii) there are at least 15, 18, 20, 25, 30, 31, 35, 40, 45, 49, 50, or 53 nucleotides 3′ to the last nucleotide of the second complementarity domain, e.g., at least 15, 18, 20, 25, 30, 31, 35, 40, 45, 49, 50, or 53 nucleotides from the corresponding sequence of a naturally occurring S. pyogenes, S. thermophilus, S. aureus, or N. meningitidis gRNA, or a sequence that differs by no more than 1, 2, 3, 4, 5; 6, 7, 8, 9 or 10 nucleotides therefrom;
[1068] (iii) there are at least 16, 19, 21, 26, 31, 32, 36, 41, 46, 50, 51, or 54 nucleotides 3′ to the last nucleotide of the second complementarity domain that is complementary to its corresponding nucleotide of the first complementarity domain, e.g., at least 16, 19, 21, 26, 31, 32, 36, 41, 46, 50, 51, or 54 nucleotides from the corresponding sequence of a naturally occurring S. pyogenes, S. thermophilus, S. aureus, or N. meningitidis gRNA, or a sequence that differs by no more than 1, 2, 3, 4, 5; 6, 7, 8, 9 or 10 nucleotides therefrom;
[1069] (iv) the tail domain is at least 10, 15, 20, 25, 30, 35 or 40 nucleotides in length, e.g., it comprises at least 10, 15, 20, 25, 30, 35 or 40 nucleotides from a naturally occurring S. pyogenes, S. thermophilus, S. aureus, or N. meningitidis tail domain, or a sequence that differs by no more than 1, 2, 3, 4, 5; 6, 7, 8, 9 or 10 nucleotides therefrom; or
[1070] (v) the tail domain comprises 15, 20, 25, 30, 35, 40 nucleotides or all of the corresponding portions of a naturally occurring tail domain, e.g., a naturally occurring S. pyogenes, S. thermophilus, S. aureus, or N. meningitidis tail domain.

[1071] In an embodiment, the gRNA is configured such that it comprises properties: a and b(i).

[1072] In an embodiment, the gRNA is configured such that it comprises properties: a and b(ii).

[1073] In an embodiment, the gRNA is configured such that it comprises properties: a and b(iii).

[1074] In an embodiment, the gRNA is configured such that it comprises properties: a and b(iv).

[1075] In an embodiment, the gRNA is configured such that it comprises properties: a and b(v).

[1076] In an embodiment, the gRNA is configured such that it comprises properties: a and b(vi).

[1077] In an embodiment, the gRNA is configured such that it comprises properties: a and b(vii).

[1078] In an embodiment, the gRNA is configured such that it comprises properties: a and b(viii).

[1079] In an embodiment, the gRNA is configured such that it comprises properties: a and b(ix).

[1080] In an embodiment, the gRNA is configured such that it comprises properties: a and b(x).

[1081] In an embodiment, the gRNA is configured such that it comprises properties: a and b(xi).

[1082] In an embodiment, the gRNA is configured such that it comprises properties: a and c.

[1083] In an embodiment, the gRNA is configured such that in comprises properties: a, b, and c.

[1084] In an embodiment, the gRNA is configured such that in comprises properties: a(i), b(i), and c(i).

[1085] In an embodiment, the gRNA is configured such that in comprises properties: a(i), b(i), and c(ii).

[1086] In an embodiment, the gRNA is configured such that in comprises properties: a(i), b(ii), and c(i).

[1087] In an embodiment, the gRNA is configured such that in comprises properties: a(i), b(ii), and c(ii).

[1088] In an embodiment, the gRNA is configured such that in comprises properties: a(i), b(iii), and c(i).

[1089] In an embodiment, the gRNA is configured such that in comprises properties: a(i), b(iii), and c(ii).

[1090] In an embodiment, the gRNA is configured such that in comprises properties: a(i), b(iv), and c(i).

[1091] In an embodiment, the gRNA is configured such that in comprises properties: a(i), b(iv), and c(ii).

[1092] In an embodiment, the gRNA is configured such that in comprises properties: a(i), b(v), and c(i).

[1093] In an embodiment, the gRNA is configured such that in comprises properties: a(i), b(v), and c(ii).

[1094] In an embodiment, the gRNA is configured such that in comprises properties: a(i), b(vi), and c(i).

[1095] In an embodiment, the gRNA is configured such that in comprises properties: a(i), b(vi), and c(ii).

[1096] In an embodiment, the gRNA is configured such that in comprises properties: a(i), b(vii), and c(i).

[1097] In an embodiment, the gRNA is configured such that in comprises properties: a(i), b(vii), and c(ii).

[1098] In an embodiment, the gRNA is configured such that in comprises properties: a(i), b(viii), and c(i).

[1099] In an embodiment, the gRNA is configured such that in comprises properties: a(i), b(viii), and c(ii).

[1100] In an embodiment, the gRNA is configured such that in comprises properties: a(i), b(ix), and c(i).

[1101] In an embodiment, the gRNA is configured such that in comprises properties: a(i), b(ix), and c(ii).

[1102] In an embodiment, the gRNA is configured such that in comprises properties: a(i), b(x), and c(i).

[1103] In an embodiment, the gRNA is configured such that in comprises properties: a(i), b(x), and c(ii).

[1104] In an embodiment, the gRNA is configured such that in comprises properties: a(i), b(xi), and c(i).

[1105] In an embodiment, the gRNA is configured such that in comprises properties: a(i), b(xi), and c(ii).

[1106] In an embodiment, the gRNA, e.g., a chimeric gRNA, is configured such that it comprises one or more of the following properties;

[1107] a) one or both of the gRNAs can position, e.g., when targeting a Cas9 molecule that makes single strand breaks, a single strand break within (i) 50, 100, 150, 200, 250, 300, 350, 400, 450, or 500 nucleotides of a target position, or (ii) sufficiently close that the target position is within the region of end resection;

[1108] b) one or both have a targeting domain of at least 16 nucleotides, e.g., a targeting domain of (i) 16, (ii), 17, (iii) 18, (iv) 19, (v) 20, (vi) 21, (vii) 22, (viii) 23, (ix) 24, (x) 25, or (xi) 26 nucleotides; and

[1109] c)
[1110] (i) the proximal and tail domain, when taken together, comprise at least 15, 18, 20, 25, 30, 31, 35, 40, 45, 49, 50, or 53 nucleotides, e.g., at least 15, 18, 20, 25, 30, 31, 35, 40, 45, 49, 50, or 53 nucleotides from a naturally occurring S. pyogenes, S. thermophilus, S. aureus, or N. meningitidis tail and proximal domain, or a sequence that differs by no more than 1, 2, 3, 4, 5; 6, 7, 8, 9 or 10 nucleotides therefrom;
[1111] (ii) there are at least 15, 18, 20, 25, 30, 31, 35, 40, 45, 49, 50, or 53 nucleotides 3′ to the last nucleotide of the second complementarity domain, e.g., at least 15, 18, 20, 25, 30, 31, 35, 40, 45, 49, 50, or 53 nucleotides from the corresponding sequence of a naturally occurring S. pyogenes, S. thermophilus, S. aureus, or N. meningitidis gRNA, or a sequence that differs by no more than 1, 2, 3, 4, 5; 6, 7, 8, 9 or 10 nucleotides therefrom;
[1112] (iii) there are at least 16, 19, 21, 26, 31, 32, 36, 41, 46, 50, 51, or 54 nucleotides 3′ to the last nucleotide of the second complementarity domain that is complementary to its corresponding nucleotide of the first complementarity domain, e.g., at least 16, 19, 21, 26, 31, 32, 36, 41, 46, 50, 51, or 54 nucleotides from the corresponding sequence of a naturally occurring S. pyogenes, S. thermophilus, S. aureus, or N. meningitidis gRNA, or a sequence that differs by no more than 1, 2, 3, 4, 5; 6, 7, 8, 9 or 10 nucleotides therefrom;
[1113] (iv) the tail domain is at least 10, 15, 20, 25, 30, 35 or 40 nucleotides in length, e.g., it comprises at least 10, 15, 20, 25, 30, 35 or 40 nucleotides from a naturally occurring S. pyogenes, S. thermophilus, S. aureus, or N. meningitidis tail domain, or a sequence that differs by no more than 1, 2, 3, 4, 5; 6, 7, 8, 9 or 10 nucleotides therefrom; or
[1114] (v) the tail domain comprises 15, 20, 25, 30, 35, 40 nucleotides or all of the corresponding portions of a naturally occurring tail domain, e.g., a naturally occurring S. pyogenes, S. thermophilus, S. aureus, or N. meningitidis tail domain.

[1115] In an embodiment, the gRNA is configured such that it comprises properties: a and b(i).

[1116] In an embodiment, the gRNA is configured such that it comprises properties: a and b(ii).

[1117] In an embodiment, the gRNA is configured such that it comprises properties: a and b(iii).

[1118] In an embodiment, the gRNA is configured such that it comprises properties: a and b(iv).

[1119] In an embodiment, the gRNA is configured such that it comprises properties: a and b(v).

[1120] In an embodiment, the gRNA is configured such that it comprises properties: a and b(vi).

[1121] In an embodiment, the gRNA is configured such that it comprises properties: a and b(vii).

[1122] In an embodiment, the gRNA is configured such that it comprises properties: a and b(viii).

[1123] In an embodiment, the gRNA is configured such that it comprises properties: a and b(ix).

[1124] In an embodiment, the gRNA is configured such that it comprises properties: a and b(x).

[1125] In an embodiment, the gRNA is configured such that it comprises properties: a and b(xi).

[1126] In an embodiment, the gRNA is configured such that it comprises properties: a and c.

[1127] In an embodiment, the gRNA is configured such that in comprises properties: a, b, and c.

[1128] In an embodiment, the gRNA is configured such that in comprises properties: a(i), b(i), and c(i).

[1129] In an embodiment, the gRNA is configured such that in comprises properties: a(i), b(i), and c(ii).

[1130] In an embodiment, the gRNA is configured such that in comprises properties: a(i), b(ii), and c(i).

[1131] In an embodiment, the gRNA is configured such that in comprises properties: a(i), b(ii), and c(ii).

[1132] In an embodiment, the gRNA is configured such that in comprises properties: a(i), b(iii), and c(i).

[1133] In an embodiment, the gRNA is configured such that in comprises properties: a(i), b(iii), and c(ii).

[1134] In an embodiment, the gRNA is configured such that in comprises properties: a(i), b(iv), and c(i).

[1135] In an embodiment, the gRNA is configured such that in comprises properties: a(i), b(iv), and c(ii).

[1136] In an embodiment, the gRNA is configured such that in comprises properties: a(i), b(v), and c(i).

[1137] In an embodiment, the gRNA is configured such that in comprises properties: a(i), b(v), and c(ii).

[1138] In an embodiment, the gRNA is configured such that in comprises properties: a(i), b(vi), and c(i).

[1139] In an embodiment, the gRNA is configured such that in comprises properties: a(i), b(vi), and c(ii).

[1140] In an embodiment, the gRNA is configured such that in comprises properties: a(i), b(vii), and c(i).

[1141] In an embodiment, the gRNA is configured such that in comprises properties: a(i), b(vii), and c(ii).

[1142] In an embodiment, the gRNA is configured such that in comprises properties: a(i), b(viii), and c(i).

[1143] In an embodiment, the gRNA is configured such that in comprises properties: a(i), b(viii), and c(ii).

[1144] In an embodiment, the gRNA is configured such that in comprises properties: a(i), b(ix), and c(i).

[1145] In an embodiment, the gRNA is configured such that in comprises properties: a(i), b(ix), and c(ii).

[1146] In an embodiment, the gRNA is configured such that in comprises properties: a(i), b(x), and c(i).

[1147] In an embodiment, the gRNA is configured such that in comprises properties: a(i), b(x), and c(ii).

[1148] In an embodiment, the gRNA is configured such that in comprises properties: a(i), b(xi), and c(i).

[1149] In an embodiment, the gRNA is configured such that in comprises properties: a(i), b(xi), and c(ii).

[1150] In an embodiment, the gRNA is used with a Cas9 nickase molecule having HNH activity, e.g., a Cas9 molecule having the RuvC activity inactivated, e.g., a Cas9 molecule having a mutation at D10, e.g., the D10A mutation.

[1151] In an embodiment, the gRNA is used with a Cas9 nickase molecule having RuvC activity, e.g., a Cas9 molecule having the HNH activity inactivated, e.g., a Cas9 molecule having a mutation at H840, e.g., the H840A.

[1152] In an embodiment, the gRNAs are used with a Cas9 nickase molecule having RuvC activity, e.g., a Cas9 molecule having the HNH activity inactivated, e.g., a Cas9 molecule having a mutation at H863, e.g., the N863A.

[1153] In an embodiment, a pair of gRNAs, e.g., a pair of chimeric gRNAs, comprising a first and a second gRNA, is configured such that they comprises one or more of the following properties;

[1154] a) one or both of the gRNAs can position, e.g., when targeting a Cas9 molecule that makes single strand breaks, a single strand break within (i) 50, 100, 150, 200, 250, 300, 350, 400, 450, or 500 nucleotides of a target position, or (ii) sufficiently close that the target position is within the region of end resection;

[1155] b) one or both have a targeting domain of at least 16 nucleotides, e.g., a targeting domain of (i) 16, (ii), 17, (iii) 18, (iv) 19, (v) 20, (vi) 21, (vii) 22, (viii) 23, (ix) 24, (x) 25, or (xi) 26 nucleotides;

[1156] c) for one or both:
[1157] (i) the proximal and tail domain, when taken together, comprise at least 15, 18, 20, 25, 30, 31, 35, 40, 45, 49, 50, or 53 nucleotides, e.g., at least 15, 18, 20, 25, 30, 31, 35, 40, 45, 49, 50, or 53 nucleotides from a naturally occurring S. pyogenes, S. thermophilus, S. aureus, or N. meningitidis tail and proximal domain, or a sequence that differs by no more than 1, 2, 3, 4, 5; 6, 7, 8, 9 or 10 nucleotides therefrom;
[1158] (ii) there are at least 15, 18, 20, 25, 30, 31, 35, 40, 45, 49, 50, or 53 nucleotides 3′ to the last nucleotide of the second complementarity domain, e.g., at least 15, 18, 20, 25, 30, 31, 35, 40, 45, 49, 50, or 53 nucleotides from the corresponding sequence of a naturally occurring S. pyogenes, S. thermophilus, S. aureus, or N. meningitidis gRNA, or a sequence that differs by no more than 1, 2, 3, 4, 5; 6, 7, 8, 9 or 10 nucleotides therefrom;
[1159] (iii) there are at least 16, 19, 21, 26, 31, 32, 36, 41, 46, 50, 51, or 54 nucleotides 3′ to the last nucleotide of the second complementarity domain that is complementary to its corresponding nucleotide of the first complementarity domain, e.g., at least 16, 19, 21, 26, 31, 32, 36, 41, 46, 50, 51, or 54 nucleotides from the corresponding sequence of a naturally occurring S. pyogenes, S. thermophilus, S. aureus, or N. meningitidis gRNA, or a sequence that differs by no more than 1, 2, 3, 4, 5; 6, 7, 8, 9 or 10 nucleotides therefrom;
[1160] (iv) the tail domain is at least 10, 15, 20, 25, 30, 35 or 40 nucleotides in length, e.g., it comprises at least 10, 15, 20, 25, 30, 35 or 40 nucleotides from a naturally occurring S. pyogenes, S. thermophilus, S. aureus, or N. meningitidis tail domain; or, or a sequence that differs by no more than 1, 2, 3, 4, 5; 6, 7, 8, 9 or 10 nucleotides therefrom; or
[1161] (v) the tail domain comprises 15, 20, 25, 30, 35, 40 nucleotides or all of the corresponding portions of a naturally occurring tail domain, e.g., a naturally occurring S. pyogenes, S. thermophilus, S. aureus, or N. meningitidis tail domain;

[1162] d) the gRNAs are configured such that, when hybridized to target nucleic acid, they are separated by 0-50, 0-100, 0-200, at least 10, at least 20, at least 30 or at least 50 nucleotides;

[1163] e) the breaks made by the first gRNA and second gRNA are on different strands; and

[1164] f) the PAMs are facing outwards.

[1165] In an embodiment, one or both of the gRNAs is configured such that it comprises properties: a and b(i).

[1166] In an embodiment, one or both of the gRNAs is configured such that it comprises properties: a and b(ii).

[1167] In an embodiment, one or both of the gRNAs is configured such that it comprises properties: a and b(iii).

[1168] In an embodiment, one or both of the gRNAs is configured such that it comprises properties: a and b(iv).

[1169] In an embodiment, one or both of the gRNAs is configured such that it comprises properties: a and b(v).

[1170] In an embodiment, one or both of the gRNAs is configured such that it comprises properties: a and b(vi).

[1171] In an embodiment, one or both of the gRNAs is configured such that it comprises properties: a and b(vii).

[1172] In an embodiment, one or both of the gRNAs is configured such that it comprises properties: a and b(viii).

[1173] In an embodiment, one or both of the gRNAs is configured such that it comprises properties: a and b(ix).

[1174] In an embodiment, one or both of the gRNAs is configured such that it comprises properties: a and b(x).

[1175] In an embodiment, one or both of the gRNAs is configured such that it comprises properties: a and b(xi).

[1176] In an embodiment, one or both of the gRNAs configured such that it comprises properties: a and c.

[1177] In an embodiment, one or both of the gRNAs is configured such that it comprises properties: a, b, and c.

[1178] In an embodiment, one or both of the gRNAs is configured such that it comprises properties: a(i), b(i), and c(i).

[1179] In an embodiment, one or both of the gRNAs is configured such that it comprises properties: a(i), b(i), and c(ii).

[1180] In an embodiment, one or both of the gRNAs is configured such that it comprises properties: a(i), b(i), c, and d.

[1181] In an embodiment, one or both of the gRNAs is configured such that it comprises properties: a(i), b(i), c, and e.

[1182] In an embodiment, one or both of the gRNAs is configured such that it comprises properties: a(i), b(i), c, d, and e.

[1183] In an embodiment, one or both of the gRNAs is configured such that it comprises properties: a(i), b(ii), and c(i).

[1184] In an embodiment, one or both of the gRNAs is configured such that it comprises properties: a(i), b(ii), and c(ii).

[1185] In an embodiment, one or both of the gRNAs is configured such that it comprises properties: a(i), b(ii), c, and d.

[1186] In an embodiment, one or both of the gRNAs is configured such that it comprises properties: a(i), b(ii), c, and e.

[1187] In an embodiment, one or both of the gRNAs is configured such that it comprises properties: a(i), b(ii), c, d, and e.

[1188] In an embodiment, one or both of the gRNAs is configured such that it comprises properties: a(i), b(iii), and c(i).

[1189] In an embodiment, one or both of the gRNAs is configured such that it comprises properties: a(i), b(iii), and c(ii).

[1190] In an embodiment, one or both of the gRNAs is configured such that it comprises properties: a(i), b(iii), c, and d.

[1191] In an embodiment, one or both of the gRNAs is configured such that it comprises properties: a(i), b(iii), c, and e.

[1192] In an embodiment, one or both of the gRNAs is configured such that it comprises properties: a(i), b(iii), c, d, and e.

[1193] In an embodiment, one or both of the gRNAs is configured such that it comprises properties: a(i), b(iv), and c(i).

[1194] In an embodiment, one or both of the gRNAs is configured such that it comprises properties: a(i), b(iv), and c(ii).

[1195] In an embodiment, one or both of the gRNAs is configured such that it comprises properties: a(i), b(iv), c, and d.

[1196] In an embodiment, one or both of the gRNAs is configured such that it comprises properties: a(i), b(iv), c, and e.

[1197] In an embodiment, one or both of the gRNAs is configured such that it comprises properties: a(i), b(iv), c, d, and e.

[1198] In an embodiment, one or both of the gRNAs is configured such that it comprises properties: a(i), b(v), and c(i).

[1199] In an embodiment, one or both of the gRNAs is configured such that it comprises properties: a(i), b(v), and c(ii).

[1200] In an embodiment, one or both of the gRNAs is configured such that it comprises properties: a(i), b(v), c, and d.

[1201] In an embodiment, one or both of the gRNAs is configured such that it comprises properties: a(i), b(v), c, and e.

[1202] In an embodiment, one or both of the gRNAs is configured such that it comprises properties: a(i), b(v), c, d, and e.

[1203] In an embodiment, one or both of the gRNAs is configured such that it comprises properties: a(i), b(vi), and c(i).

[1204] In an embodiment, one or both of the gRNAs is configured such that it comprises properties: a(i), b(vi), and c(ii).

[1205] In an embodiment, one or both of the gRNAs is configured such that it comprises properties: a(i), b(vi), c, and d.

[1206] In an embodiment, one or both of the gRNAs is configured such that it comprises properties: a(i), b(vi), c, and e.

[1207] In an embodiment, one or both of the gRNAs is configured such that it comprises properties: a(i), b(vi), c, d, and e.

[1208] In an embodiment, one or both of the gRNAs is configured such that it comprises properties: a(i), b(vii), and c(i).

[1209] In an embodiment, one or both of the gRNAs is configured such that it comprises properties: a(i), b(vii), and c(ii).

[1210] In an embodiment, one or both of the gRNAs is configured such that it comprises properties: a(i), b(vii), c, and d.

[1211] In an embodiment, one or both of the gRNAs is configured such that it comprises properties: a(i), b(vii), c, and e.

[1212] In an embodiment, one or both of the gRNAs is configured such that it comprises properties: a(i), b(vii), c, d, and e.

[1213] In an embodiment, one or both of the gRNAs is configured such that it comprises properties: a(i), b(viii), and c(i).

[1214] In an embodiment, one or both of the gRNAs is configured such that it comprises properties: a(i), b(viii), and c(ii).

[1215] In an embodiment, one or both of the gRNAs is configured such that it comprises properties: a(i), b(viii), c, and d.

[1216] In an embodiment, one or both of the gRNAs is configured such that it comprises properties: a(i), b(viii), c, and e.

[1217] In an embodiment, one or both of the gRNAs is configured such that it comprises properties: a(i), b(viii), c, d, and e.

[1218] In an embodiment, one or both of the gRNAs is configured such that it comprises properties: a(i), b(ix), and c(i).

[1219] In an embodiment, one or both of the gRNAs is configured such that it comprises properties: a(i), b(ix), and c(ii).

[1220] In an embodiment, one or both of the gRNAs is configured such that it comprises properties: a(i), b(ix), c, and d.

[1221] In an embodiment, one or both of the gRNAs is configured such that it comprises properties: a(i), b(ix), c, and e.

[1222] In an embodiment, one or both of the gRNAs is configured such that it comprises properties: a(i), b(ix), c, d, and e.

[1223] In an embodiment, one or both of the gRNAs is configured such that it comprises properties: a(i), b(x), and c(i).

[1224] In an embodiment, one or both of the gRNAs is configured such that it comprises properties: a(i), b(x), and c(ii).

[1225] In an embodiment, one or both of the gRNAs is configured such that it comprises properties: a(i), b(x), c, and d.

[1226] In an embodiment, one or both of the gRNAs is configured such that it comprises properties: a(i), b(x), c, and e.

[1227] In an embodiment, one or both of the gRNAs is configured such that it comprises properties: a(i), b(x), c, d, and e.

[1228] In an embodiment, one or both of the gRNAs is configured such that it comprises properties: a(i), b(xi), and c(i).

[1229] In an embodiment, one or both of the gRNAs is configured such that it comprises properties: a(i), b(xi), and c(ii).

[1230] In an embodiment, one or both of the gRNAs is configured such that it comprises properties: a(i), b(xi), c, and d.

[1231] In an embodiment, one or both of the gRNAs is configured such that it comprises properties: a(i), b(xi), c, and e.

[1232] In an embodiment, one or both of the gRNAs is configured such that it comprises properties: a(i), b(xi), c, d, and e.

[1233] In an embodiment, the gRNAs are used with a Cas9 nickase molecule having HNH activity, e.g., a Cas9 molecule having the RuvC activity inactivated, e.g., a Cas9 molecule having a mutation at D10, e.g., the D10A mutation.

[1234] In an embodiment, the gRNAs are used with a Cas9 nickase molecule having RuvC activity, e.g., a Cas9 molecule having the HNH activity inactivated, e.g., a Cas9 molecule having a mutation at H840, e.g., the H840A.

[1235] In an embodiment, the gRNAs are used with a Cas9 nickase molecule having RuvC activity, e.g., a Cas9 molecule having the HNH activity inactivated, e.g., a Cas9 molecule having a mutation at N863, e.g., the N863A.

### VI. Target Cells

[1236] Cas9 molecules and gRNA molecules, e.g., a Cas9 molecule/gRNA molecule complex, can be used to manipulate a cell, e.g., to edit a target nucleic acid, in a wide variety of cells.

[1237] In an embodiment, a cell is manipulated by altering or editing (e.g., introducing a mutation in) the CCR5 target gene, e.g., as described herein. In an embodiment, the expression of the CCR5target gene is altered or modulated, e.g., in vivo. In another embodiment, the expression of the CCR5 target gene is altered or modulated, e.g., ex vivo.

[1238] The Cas9 and gRNA molecules described herein can be delivered to a target cell. In an embodiment, the target cell is a circulating blood cell, e.g., a T cell (e.g., a CD4+ T cell, a CD8+ T cell, a helper T cell, a regulatory T cell, a cytotoxic T cell, a memory T cell, a T cell precursor or a natural killer T cell), a B cell (e.g., a progenitor B cell, a Pre B cell, a Pro B cell, a memory B cell, a plasma B cell), a monocyte, a megakaryocyte, a neutrophil, an eosinophil, a basophil, a mast cell, a reticulocyte, a lymphoid progenitor cell, a myeloid progenitor cell, a gut-associated lymphoid tissue (GALT) cell, a dendritic cell, a macrophage, a microglial cell, or a hematopoietic stem cell. In an embodiment, the target cell is a bone marrow cell, (e.g., a lymphoid progenitor cell, a myeloid progenitor cell, an erythroid progenitor cell, a hematopoietic stem cell, or a mesenchymal stem cell). In an embodiment, the target cell is a CD4+ T cell. In an embodiment, the target cell is a lymphoid progenitor cell (e.g. a common lymphoid progenitor (CLP) cell). In an embodiment, the target cell is a myeloid progenitor cell (e.g. a common myeloid progenitor (CMP) cell). In an embodiment, the target cell is a hematopoietic stem cell (e.g. a long term hematopoietic stem cell (LT-HSC), a short term hematopoietic stem cell (ST-HSC), a multipotent progenitor (MPP) cell, a lineage restricted progenitor (LRP) cell).

[1239] In an embodiment, the target cell is manipulated ex vivo by editing (e.g., introducing a mutation in) the CCR5 target gene and/or modulating the expression of the CCR5 target gene, and administered to the subject. Sources of target cells for ex vivo manipulation may include, by way of example, the subject's blood, the subject's cord blood, or the subject's bone marrow. Sources of target cells for ex vivo manipulation may also include, by way of example, heterologous donor blood, cord blood, or bone marrow.

[1240] In an embodiment, a CD4+T cell is removed from the subject, manipulated ex vivo as described above, and the CD4+T cell is returned to the subject. In an embodiment, a lymphoid progenitor cell is removed from the subject, manipulated ex vivo as described above, and the lymphoid progenitor cell is returned to the subject. In an embodiment, a myeloid progenitor cell is removed from the subject, manipulated ex vivo as described above, and the myeloid progenitor cell is returned to the subject. In an embodiment, a hematopoietic stem cell is removed from the subject, manipulated ex vivo as described above, and the hematopoietic stem cell is returned to the subject.

[1241] A suitable cell can also include a stem cell such as, by way of example, an embryonic stem cell, an induced pluripotent stem cell, a hematopoietic stem cell, a neuronal stem cell and a mesenchymal stem cell. In an embodiment, the cell is an induced pluripotent stem cells (iPS) cell or a cell derived from an iPS cell, e.g., an iPS cell generated from the subject, modified to correct the mutation and differentiated into a clinically relevant cell such as e.g, a CD4+ T cell, a lymphoid progenitor cell, myeloid progenitor cell, a macrophage, dendritic cell, gut associated lymphoid tissue or a hematopoietic stem cell. In an embodiment, AAV is used to transduce the target cells, e.g., the target cells described herein.

### VII. Delivery, Formulations and Routes of Administration

[1242] The components, e.g., a Cas9 molecule and gRNA molecule can be delivered or formulated in a variety of forms, see, e.g., Tables 14 and 15. In an embodiment, one Cas9 molecule and two or more (e.g., 2, 3, 4, or more) different gRNA molecules are delivered, e.g., by an AAV vector. In an embodiment, the sequence encoding the Cas9 molecule and the sequence(s) encoding the two or more (e.g., 2, 3, 4, or more) different gRNA molecules are present on the same nucleic acid molecule, e.g., an AAV vector. When a Cas9 or gRNA component is encoded as DNA for delivery, the DNA will typically but not necessarily include a control region, e.g., comprising a promoter, to effect expression. Useful promoters for Cas9 molecule sequences include CMV, EFS, EF-1a, MSCV, PGK, CAG control promoters. In an embodiment, the promoter is a constitutive promoter. In another embodiment, the promoter is a tissue specific promoter. Useful promoters for gRNAs include H1, 7SK, tRNA, and U6 promoters. Promoters with similar or dissimilar strengths can be selected to tune the expression of components. Sequences encoding a Cas9 molecule can comprise a nuclear localization signal (NLS), e.g., an SV40 NLS. In an embodiment, the sequence encoding a Cas9 molecule comprises at least two nuclear localization signals. In an embodiment a promoter for a Cas9 molecule or a gRNA molecule can be, independently, inducible, tissue specific, or cell specific.

[1243] Table 14 provides examples of how the components can be formulated, delivered, or administered.

TABLE 14
Elements

| Cas9 | gRNA | |
|---|---|---|
| Mole- | mole- | |
| cule(s) | cule(s) | Comments |
| DNA | DNA | In this embodiment, a Cas9 molecule, typically |
| | | an eaCas9 molecule, and a gRNA are transcribed |
| | | from DNA. In this embodiment, they are |
| | | encoded on separate molecules. |
| DNA | | In this embodiment, a Cas9 molecule, typically |
| | | an eaCas9 molecule, and a gRNA are transcribed |
| | | from DNA, here from a single molecule. |
| DNA | RNA | In this embodiment, a Cas9 molecule, typically |
| | | an eaCas9 molecule, is transcribed from |
| | | DNA, and a gRNA is provided as in vitro |
| | | transcribed or synthesized RNA |
| mRNA | RNA | In this embodiment, a Cas9 molecule, typically |
| | | an eaCas9 molecule, is translated from in vitro |
| | | transcribed mRNA, and a gRNA is provided as |
| | | in vitro transcribed or synthesized RNA. |
| mRNA | DNA | In this embodiment, a Cas9 molecule, typically |
| | | an eaCas9 molecule, is translated from in vitro |
| | | transcribed mRNA, and a gRNA is transcribed |
| | | from DNA. |
| Protein | DNA | In this embodiment, a Cas9 molecule, typically |
| | | an eaCas9 molecule, is provided as a protein, |
| | | and a gRNA is transcribed from DNA. |
| Protein | RNA | In this embodiment, an eaCas9 molecule is |
| | | provided as a protein, and a gRNA is provided |
| | | as transcribed or synthesized RNA. |

[1244] Table 15 summarizes various delivery methods for the components of a Cas system, e.g., the Cas9 molecule component and the gRNA molecule component, as described herein.

TABLE 15

| | | Delivery | | | |
|---|---|---|---|---|---|
| | | into Non- | Duration | | Type of |
| | | Dividing | of | Genome | Molecule |
| Delivery Vector/Mode | | Cells | Expression | Integration | Delivered |
| Physical (e.g., | | YES | Transient | NO | Nucleic |
| electroporation, particle gun, | | | | | Acids and |
| Calcium Phosphate | | | | | Proteins |
| transfection, cell compression | | | | | |
| or squeezing) | | | | | |
| Viral | Retrovirus | NO | Stable | YES | RNA |
| | Lentivirus | YES | Stable | YES/NO with | RNA |
| | | | | modifications | |
| | Adenovirus | YES | Transient | NO | DNA |
| | Adeno- | YES | Stable | NO | DNA |
| | Associated | | | | |
| | Virus (AAV) | | | | |
| | Vaccinia Virus | YES | Very | NO | DNA |
| | | | Transient | | |
| | Herpes Simplex | YES | Stable | NO | DNA |
| | Virus | | | | |
| Non-Viral | Cationic | YES | Transient | Depends on | Nucleic |
| | Liposomes | | | what is | Acids and |
| | | | | delivered | Proteins |
| | Polymeric | YES | Transient | Depends on | Nucleic |
| | Nanoparticles | | | what is | Acids and |
| | | | | delivered | Proteins |
| Biological | Attenuated | YES | Transient | NO | Nucleic |
| Non-Viral | Bacteria | | | | Acids |
| Delivery | Engineered | YES | Transient | NO | Nucleic |
| Vehicles | Bacteriophages | | | | Acids |
| | Mammalian | YES | Transient | NO | Nucleic |
| | Virus-like | | | | Acids |
| | Particles | | | | |
| | Biological | YES | Transient | NO | Nucleic |
| | liposomes: | | | | Acids |
| | Erythrocyte | | | | |
| | Ghosts and | | | | |
| | Exosomes | | | | |

DNA-Based Delivery of a Cas9 Molecule and or One or More gRNA Molecule

[1245] Nucleic acids encoding Cas9 molecules (e.g., eaCas9 molecules) and/or gRNA molecules, can be administered to subjects or delivered into cells by art-known methods or as described herein. For example, Cas9-encoding and/or gRNA-encoding DNA can be delivered, e.g., by vectors (e.g., viral or non-viral vectors), non-vector based methods (e.g., using naked DNA or DNA complexes), or a combination thereof.

[1246] DNA encoding Cas9 molecules (e.g., eaCas9 molecules) and/or gRNA molecules can be conjugated to molecules (e.g., N-acetylgalactosamine) promoting uptake by the target cells (e.g., the target cells described herein).

[1247] In some embodiments, the Cas9- and/or gRNA-encoding DNA is delivered by a vector (e.g., viral vector/virus or plasmid).

[1248] A vector can comprise a sequence that encodes a Cas9 molecule and/or a gRNA molecule. A vector can also comprise a sequence encoding a signal peptide (e.g., for nuclear localization, nucleolar localization, mitochondrial localization), fused, e.g., to a Cas9 molecule sequence. For example, ae vector can comprise a nuclear localization sequence (e.g., from SV40) fused to the sequence encoding the Cas9 molecule.

[1249] One or more regulatory/control elements, e.g., a promoter, an enhancer, an intron, a polyadenylation signal, a Kozak consensus sequence, internal ribosome entry sites (IRES), a 2A sequence, and splice acceptor or donor can be included in the vectors. In some embodiments, the promoter is recognized by RNA polymerase II (e.g., a CMV promoter). In other embodiments, the promoter is recognized by RNA polymerase III (e.g., a U6 promoter). In some embodiments, the promoter is a regulated promoter (e.g., inducible promoter). In other embodiments, the promoter is a constitutive promoter. In some embodiments, the promoter is a tissue specific promoter. In some embodiments, the promoter is a viral promoter. In other embodiments, the promoter is a non-viral promoter.

[1250] In some embodiments, the vector or delivery vehicle is a viral vector (e.g., for generation of recombinant viruses). In some embodiments, the virus is a DNA virus (e.g., dsDNA or ssDNA virus). In other embodiments, the virus is an RNA virus (e.g., an ssRNA virus). Exemplary viral vectors/viruses include, e.g., retroviruses, lentiviruses, adenovirus, adeno-associated virus (AAV), vaccinia viruses, poxviruses, and herpes simplex viruses.

[1251] In some embodiments, the virus infects dividing cells. In other embodiments, the virus infects non-dividing cells. In some embodiments, the virus infects both dividing and non-dividing cells. In some embodiments, the virus can integrate into the host genome. In some embodiments, the virus is engineered to have reduced immunity, e.g., in human. In some embodiments, the virus is replication-competent. In other embodiments, the virus is replication-defective, e.g., having one or more coding regions for the genes necessary for additional rounds of virion replication and/or packaging replaced with other genes or deleted. In some embodiments, the virus causes transient expression of the Cas9 molecule and/or the gRNA molecule. In other embodiments, the virus causes long-lasting, e.g., at least 1 week, 2 weeks, 1 month, 2 months, 3 months, 6 months, 9 months, 1 year, 2 years, or permanent expression, of the Cas9 molecule and/or the gRNA molecule. The packaging capacity of the viruses may vary, e.g., from at least about 4 kb to at least about 30 kb, e.g., at least about 5 kb, 10 kb, 15 kb, 20 kb, 25 kb, 30 kb, 35 kb, 40 kb, 45 kb, or 50 kb.

[1252] In an embodiment, the viral vector recognizes a specific cell type or tissue. For example, the viral vector can be pseudotyped with a different/alternative viral envelope glycoprotein; engineered with a cell type-specific receptor (e.g., genetic modification(s) of one or more viral envelope glycoproteins to incorporate a targeting ligand such as a peptide ligand, a single chain antibody, or a growth factor); and/or engineered to have a molecular bridge with dual specificities with one end recognizing a viral glycoprotein and the other end recognizing a moiety of the target cell surface (e.g., a ligand-receptor, monoclonal antibody, avidin-biotin and chemical conjugation).

[1253] Exemplary viral vectors/viruses include, e.g., retroviruses, lentiviruses, adenovirus, adeno-associated virus (AAV), vaccinia viruses, poxviruses, and herpes simplex viruses.

[1254] In some embodiments, the Cas9- and/or gRNA-encoding DNA is delivered by a recombinant retrovirus. In some embodiments, the retrovirus (e.g., Moloney murine leukemia virus) comprises a reverse transcriptase, e.g., that allows integration into the host genome. In some embodiments, the retrovirus is replication-competent. In other embodiments, the retrovirus is replication-defective, e.g., having one of more coding regions for the genes necessary for additional rounds of virion replication and packaging replaced with other genes, or deleted.

[1255] In some embodiments, the Cas9- and/or gRNA-encoding DNA is delivered by a recombinant lentivirus. For example, the lentivirus is replication-defective, e.g., does not comprise one or more genes required for viral replication.

[1256] In some embodiments, the Cas9- and/or gRNA-encoding DNA is delivered by a recombinant adenovirus. In some embodiments, the adenovirus is engineered to have reduced immunity in human.

[1257] In some embodiments, the Cas9- and/or gRNA-encoding DNA is delivered by a recombinant AAV. In some embodiments, the AAV does not incorporate its genome into that of a host cell, e.g., a target cell as describe herein. In some embodiments, the AAV can incorporate at least part of its genome into that of a host cell, e.g., a target cell as described herein. In some embodiments, the AAV is a self-complementary adeno-associated virus (scAAV), e.g., a scAAV that packages both strands which anneal together to form double stranded DNA. AAV serotypes that may be used in the disclosed methods, include AAV1, AAV2, modified AAV2 (e.g., modifications at Y444F, Y500F, Y730F and/or S662V), AAV3, modified AAV3 (e.g., modifications at Y705F, Y731F and/or T492V), AAV4, AAV5, AAV6, modified AAV6 (e.g., modifications at S663V and/or T492V), AAV8, AAV 8.2, AAV9, AAV rh 10, and pseudotyped AAV, such as AAV2/8, AAV2/5 and AAV2/6 can also be used in the disclosed methods. In an embodiment, an AAV capsid that can be used in the methods described herein is a capsid sequence from serotype AAV1, AAV2, AAV3, AAV4, AAV5, AAV6, AAV7, AAV8, AAV9, AAV.rh8, AAV.rh10, AAV.rh32/33, AAV.rh43, AAV.rh64R1, or AAV7m8.

[1258] In an embodiment, the Cas9- and/or gRNA-encoding DNA is delivered in a re-engineered AAV capsid, e.g., with 50% or greater, e.g., 60% or greater, 70% or greater, 80% or greater, 90% or greater, or 95% or greater, sequence homology with a capsid sequence from serotypes AAV1, AAV2, AAV3, AAV4, AAV5, AAV6, AAV7, AAV8, AAV9, AAV.rh8, AAV.rh10, AAV.rh32/33, AAV.rh43, or AAV.rh64R1.

[1259] In an embodiment, the Cas9- and/or gRNA-encoding DNA is delivered by a chimeric AAV capsid. Exemplary chimeric AAV capsids include, but are not limited to, AAV9i1, AAV2i8, AAV-DJ, AAV2G9, AAV2i8G9, or AAV8G9.

[1260] In an embodiment, the AAV is a self-complementary adeno-associated virus (scAAV), e.g., a scAAV that packages both strands which anneal together to form double stranded DNA.

[1261] In some embodiments, the Cas9- and/or gRNA-encoding DNA is delivered by a hybrid virus, e.g., a hybrid of one or more of the viruses described herein. In an embodiment, the hybrid virus is hybrid of an AAV (e.g., of any AAV serotype), with a Bocavirus, B19 virus, porcine AAV, goose AAV, feline AAV, canine AAV, or MVM.

[1262] A Packaging cell is used to form a virus particle that is capable of infecting a target cell. Such a cell includes a 293 cell, which can package adenovirus, and a ψ2 cell or a PA317 cell, which can package retrovirus. A viral vector used in gene therapy is usually generated by a producer cell line that packages a nucleic acid vector into a viral particle. The vector typically contains the minimal viral sequences required for packaging and subsequent integration into a host or target cell (if applicable), with other viral sequences being replaced by an expression cassette encoding the protein to be expressed, eg. Cas9. For example, an AAV vector used in gene therapy typically only possesses inverted terminal repeat (ITR) sequences from the AAV genome which are required for packaging and gene expression in the host or target cell. The missing viral functions can be supplied in trans by the packaging cell line and/or plasmid containing E2A, E4, and VA genes from adenovirus, and plasmid encoding Rep and Cap genes from AAV, as described in “Triple Transfection Protocol.” Henceforth, the viral DNA is packaged in a cell line, which contains a helper plasmid encoding the other AAV genes, namely rep and cap, but lacking ITR sequences. In embodiment, the viral DNA is packaged in a producer cell line, which contains E1A and/or E1B genes from adenovirus. The cell line is also infected with adenovirus as a helper. The helper virus (e.g., adenovirus or HSV) or helper plasmid promotes replication of the AAV vector and expression of AAV genes from the helper plasmid with ITRs. The helper plasmid is not packaged in significant amounts due to a lack of ITR sequences. Contamination with adenovirus can be reduced by, e.g., heat treatment to which adenovirus is more sensitive than AAV.

[1263] In an embodiment, the viral vector has the ability of cell type and/or tissue type recognition. For example, the viral vector can be pseudotyped with a different/alternative viral envelope glycoprotein; engineered with a cell type-specific receptor (e.g., genetic modification of the viral envelope glycoproteins to incorporate targeting ligands such as a peptide ligand, a single chain antibody, a growth factor); and/or engineered to have a molecular bridge with dual specificities with one end recognizing a viral glycoprotein and the other end recognizing a moiety of the target cell surface (e.g., ligand-receptor, monoclonal antibody, avidin-biotin and chemical conjugation).

[1264] In an embodiment, the viral vector achieves cell type specific expression. For example, a tissue-specific promoter can be constructed to restrict expression of the transgene (Cas 9 and gRNA) in only the target cell. The specificity of the vector can also be mediated by microRNA-dependent control of transgene expression. In an embodiment, the viral vector has increased efficiency of fusion of the viral vector and a target cell membrane. For example, a fusion protein such as fusion-competent hemagglutin (HA) can be incorporated to increase viral uptake into cells. In an embodiment, the viral vector has the ability of nuclear localization. For example, a virus that requires the breakdown of the cell wall (during cell division) and therefore will not infect a non-diving cell can be altered to incorporate a nuclear localization peptide in the matrix protein of the virus thereby enabling the transduction of non-proliferating cells.

[1265] In some embodiments, the Cas9- and/or gRNA-encoding DNA is delivered by a non-vector based method (e.g., using naked DNA or DNA complexes). For example, the DNA can be delivered, e.g., by organically modified silica or silicate (Ormosil), electroporation, transient cell compression or squeezing (e.g., as described in Lee, et al, 2012, Nano Lett 12: 6322-27), gene gun, sonoporation, magnetofection, lipid-mediated transfection, dendrimers, inorganic nanoparticles, calcium phosphates, or a combination thereof.

[1266] In an embodiment, delivery via electroporation comprises mixing the cells with the Cas9- and/or gRNA-encoding DNA in a cartridge, chamber or cuvette and applying one or more electrical impulses of defined duration and amplitude. In an embodiment, delivery via electroporation is performed using a system in which cells are mixed with the Cas9- and/or gRNA-encoding DNA in a vessel connected to a device (e.g, a pump) which feeds the mixture into a cartridge, chamber or cuvette wherein one or more electrical impulses of defined duration and amplitude are applied, after which the cells are delivered to a second vessel.

[1267] In some embodiments, the Cas9- and/or gRNA-encoding DNA is delivered by a combination of a vector and a non-vector based method. For example, a virosome comprises a liposome combined with an inactivated virus (e.g., HIV or influenza virus), which can result in more efficient gene transfer, e.g., in a respiratory epithelial cell than either a viral or a liposomal method alone.

[1268] In an embodiment, the delivery vehicle is a non-viral vector. In an embodiment, the non-viral vector is an inorganic nanoparticle. Exemplary inorganic nanoparticles include, e.g., magnetic nanoparticles (e.g., Fe₃MnO₂) silica The outer surface of the nanoparticle can be conjugated with a positively charged polymer (e.g., polyethylenimine, polylysine, polyserine) which allows for attachment (e.g., conjugation or entrapment) of payload. In an embodiment, the non-viral vector is an organic nanoparticle (e.g., entrapment of the payload inside the nanoparticle). Exemplary organic nanoparticles include, e.g., SNALP liposomes that contain cationic lipids together with neutral helper lipids which are coated with polyethylene glycol (PEG) and protamine and nucleic acid complex coated with lipid coating.

[1269] Exemplary lipids for gene transfer are shown below in Table 16.

TABLE 16
Lipids Used for Gene Transfer

| Lipid | Abbreviation | Feature |
|---|---|---|
| 1,2-Dioleoyl-sn-glycero-3-phosphatidylcholine | DOPC | Helper |
| 1,2-Dioleoyl-sn-glycero-3-phosphatidylethanolamine | DOPE | Helper |
| Cholesterol | | Helper |
| N-[1-(2,3-Dioleyloxy)prophyl]N,N,N-trimethylammonium chloride | DOTMA | Cationic |
| 1,2-Dioleoyloxy-3-trimethylammonium-propane | DOTAP | Cationic |
| Dioctadecylamidoglycylspermine | DOGS | Cationic |
| N-(3-Aminopropyl)-N,N-dimethyl-2,3-bis(dodecyloxy)-1- | GAP-DLRIE | Cationic |
| propanaminium bromide | | |
| Cetyltrimethylammonium bromide | CTAB | Cationic |
| 6-Lauroxyhexyl ornithinate | LHON | Cationic |
| 1-(2,3-Dioleoyloxypropyl)-2,4,6-trimethylpyridinium | 2Oc | Cationic |
| 2,3-Dioleyloxy-N-[2(sperminecarboxamido-ethyl]-N,N-dimethyl-1- | DOSPA | Cationic |
| propanaminium trifluoroacetate | | |
| 1,2-Dioleyl-3-trimethylammonium-propane | DOPA | Cationic |
| N-(2-Hydroxyethyl)-N,N-dimethyl-2,3-bis(tetradecyloxy)-1- | MDRIE | Cationic |
| propanaminium bromide | | |
| Dimyristooxypropyl dimethyl hydroxyethyl ammonium bromide | DMRI | Cationic |
| 3β-[N-(N′,N′-Dimethylaminoethane)-carbamoyl]cholesterol | DC-Chol | Cationic |
| Bis-guanidium-tren-cholesterol | BGTC | Cationic |
| 1,3-Diodeoxy-2-(6-carboxy-spermyl)-propylamide | DOSPER | Cationic |
| Dimethyloctadecylammonium bromide | DDAB | Cationic |
| Dioctadecylamidoglicylspermidin | DSL | Cationic |
| rac-[(2,3-Dioctadecyloxypropyl)(2-hydroxyethyl)]- | CLIP-1 | Cationic |
| dimethylammonium chloride | | |
| rac-[2(2,3-Dihexadecyloxypropyl- | CLIP-6 | Cationic |
| oxymethyloxy)ethyl]trimethylammonium bromide | | |
| Ethyldimyristoylphosphatidylcholine | EDMPC | Cationic |
| 1,2-Distearyloxy-N,N-dimethyl-3-aminopropane | DSDMA | Cationic |
| 1,2-Dimyristoyl-trimethylammonium propane | DMTAP | Cationic |
| O,O′-Dimyristyl-N-lysyl aspartate | DMKE | Cationic |
| 1,2-Distearoyl-sn-glycero-3-ethylphosphocholine | DSEPC | Cationic |
| N-Palmitoyl D-erythro-sphingosyl carbamoyl-spermine | CCS | Cationic |
| N-t-Butyl-N0-tetradecyl-3-tetradecylaminopropionamidine | diC14-amidine | Cationic |
| Octadecenolyoxy[ethyl-2-heptadecenyl-3 hydroxyethyl] | DOTIM | Cationic |
| imidazolinium chloride | | |
| N1-Cholesteryloxycarbonyl-3,7-diazanonane-1,9-diamine | CDAN | Cationic |
| 2-(3-[Bis(3-amino-propyl)-amino]propylamino)-N- | RPR209120 | Cationic |
| ditetradecylcarbamoylme-ethyl-acetamide | | |
| 1,2-dilinoleyloxy-3-dimethylaminopropane | DLinDMA | Cationic |
| 2,2-dilinoleyl-4-dimethylaminoethyl-[1,3]-dioxolane | DLin-KC2-DMA | Cationic |
| dilinoleyl-methyl-4-dimethylaminobutyrate | DLin-MC3-DMA | Cationic |

[1270] Exemplary polymers for gene transfer are shown below in Table 17.

TABLE 17
Polymers Used for Gene Transfer

| Polymer | Abbreviation |
|---|---|
| Poly(ethylene)glycol | PEG |
| Polyethylenimine | PEI |
| Dithiobis(succinimidylpropionate) | DSP |
| Dimethyl-3,3′-dithiobispropionimidate | DTBP |
| Poly(ethyleneimine)biscarbamate | PEIC |
| Poly(L-lysine) | PLL |
| Histidine modified PLL | |
| Poly(N-vinylpyrrolidone) | PVP |
| Poly(propylenimine) | PPI |
| Poly(amidoamine) | PAMAM |
| Poly(amido ethylenimine) | SS-PAEI |
| Triethylenetetramine | TETA |
| Poly(β-aminoester) | |
| Poly(4-hydroxy-L-proline ester) | PHP |
| Poly(allylamine) | |
| Poly(α-[4-aminobutyl]-L-glycolic acid) | PAGA |
| Poly(D,L-lactic-co-glycolic acid) | PLGA |
| Poly(N-ethyl-4-vinylpyridinium bromide) | |
| Poly(phosphazene)s | PPZ |
| Poly(phosphoester)s | PPE |
| Poly(phosphoramidate)s | PPA |
| Poly(N-2-hydroxypropylmethacrylamide) | pHPMA |
| Poly (2-(dimethylamino)ethyl methacrylate) | pDMAEMA |
| Poly(2-aminoethyl propylene phosphate) | PPE-EA |
| Chitosan | |
| Galactosylated chitosan | |
| N-Dodacylated chitosan | |
| Histone | |
| Collagen | |
| Dextran-spermine | D-SPM |

[1271] In an embodiment, the vehicle has targeting modifications to increase target cell update of nanoparticles and liposomes, e.g., cell specific antigens, monoclonal antibodies, single chain antibodies, aptamers, polymers, sugars, and cell penetrating peptides. In an embodiment, the vehicle uses fusogenic and endosome-destabilizing peptides/polymers. In an embodiment, the vehicle undergoes acid-triggered conformational changes (e.g., to accelerate endosomal escape of the cargo). In an embodiment, a stimuli-cleavable polymer is used, e.g., for release in a cellular compartment. For example, disulfide-based cationic polymers that are cleaved in the reducing cellular environment can be used.

[1272] In an embodiment, the delivery vehicle is a biological non-viral delivery vehicle. In an embodiment, the vehicle is an attenuated bacterium (e.g., naturally or artificially engineered to be invasive but attenuated to prevent pathogenesis and expressing the transgene (e.g., Listeria monocytogenes, certain Salmonella strains, Bifidobacterium longum, and modified Escherichia coli), bacteria having nutritional and tissue-specific tropism to target specific tissues, bacteria having modified surface proteins to alter target tissue specificity). In an embodiment, the vehicle is a genetically modified bacteriophage (e.g., engineered phages having large packaging capacity, less immunogenic, containing mammalian plasmid maintenance sequences and having incorporated targeting ligands). In an embodiment, the vehicle is a mammalian virus-like particle. For example, modified viral particles can be generated (e.g., by purification of the “empty” particles followed by ex vivo assembly of the virus with the desired cargo). The vehicle can also be engineered to incorporate targeting ligands to alter target tissue specificity. In an embodiment, the vehicle is a biological liposome. For example, the biological liposome is a phospholipid-based particle derived from human cells (e.g., erythrocyte ghosts, which are red blood cells broken down into spherical structures derived from the subject (e.g., tissue targeting can be achieved by attachment of various tissue or cell-specific ligands), or secretory exosomes—subject (i.e., patient) derived membrane-bound nanovescicle (30-100 nm) of endocytic origin (e.g., can be produced from various cell types and can therefore be taken up by cells without the need of for targeting ligands).

[1273] In an embodiment, one or more nucleic acid molecules (e.g., DNA molecules) other than the components of a Cas system, e.g., the Cas9 molecule component and/or the gRNA molecule component described herein, are delivered. In an embodiment, the nucleic acid molecule is delivered at the same time as one or more of the components of the Cas system are delivered. In an embodiment, the nucleic acid molecule is delivered before or after (e.g., less than about 30 minutes, 1 hour, 2 hours, 3 hours, 6 hours, 9 hours, 12 hours, 1 day, 2 days, 3 days, 1 week, 2 weeks, or 4 weeks) one or more of the components of the Cas system are delivered. In an embodiment, the nucleic acid molecule is delivered by a different means than one or more of the components of the Cas system, e.g., the Cas9 molecule component and/or the gRNA molecule component, are delivered. The nucleic acid molecule can be delivered by any of the delivery methods described herein. For example, the nucleic acid molecule can be delivered by a viral vector, e.g., an integration-deficient lentivirus, and the Cas9 molecule component and/or the gRNA molecule component can be delivered by electroporation, e.g., such that the toxicity caused by nucleic acids (e.g., DNAs) can be reduced. In an embodiment, the nucleic acid molecule encodes a therapeutic protein, e.g., a protein described herein. In an embodiment, the nucleic acid molecule encodes an RNA molecule, e.g., an RNA molecule described herein.

[1274] Delivery of RNA Encoding a Cas9 Molecule

[1275] RNA encoding Cas9 molecules (e.g., eaCas9 molecules or eiCas9 molecules) and/or gRNA molecules, can be delivered into cells, e.g., target cells described herein, by art-known methods or as described herein. For example, Cas9-encoding and/or gRNA-encoding RNA can be delivered, e.g., by microinjection, electroporation, transient cell compression or squeezing (e.g., as described in Lee, et al., 2012, Nano Lett 12: 6322-27), lipid-mediated transfection, peptide-mediated delivery, or a combination thereof. Cas9-encoding and/or gRNA-encoding RNA can be conjugated to molecules to promote uptake by the target cells (e.g., target cells described herein).

[1276] In an embodiment, delivery via electroporation comprises mixing the cells with the RNA encoding Cas9 molecules (e.g., eaCas9 molecules, eiCas9 molecules or eiCas9 fusion proteins) and/or gRNA molecules in a cartridge, chamber or cuvette and applying one or more electrical impulses of defined duration and amplitude. In an embodiment, delivery via electroporation is performed using a system in which cells are mixed with the RNA encoding Cas9 molecules (e.g., eaCas9 molecules, eiCas9 molecules or eiCas9 fusion proteins) and/or gRNA molecules in a vessel connected to a device (e.g., a pump) which feeds the mixture into a cartridge, chamber or cuvette wherein one or more electrical impulses of defined duration and amplitude are applied, after which the cells are delivered to a second vessel.

[1277] Delivery Cas9 Molecule Protein

[1278] Cas9 molecules (e.g., eaCas9 molecules or eiCas9 molecules) can be delivered into cells by art-known methods or as described herein. For example, Cas9 protein molecules can be delivered, e.g., by microinjection, electroporation, transient cell compression or squeezing (e.g., as described in Lee, et al, 2012, Nano Lett 12: 6322-27), lipid-mediated transfection, peptide-mediated delivery, or a combination thereof. Delivery can be accompanied by DNA encoding a gRNA or by a gRNA. Cas9 protein can be conjugated to molecules promoting uptake by the target cells (e.g., target cells described herein).

[1279] In an embodiment, delivery via electroporation comprises mixing the cells with the Cas9 molecules (e.g., eaCas9 molecules, eiCas9 molecules or eiCas9 fusion proteins) with or without gRNA molecules in a cartridge, chamber or cuvette and applying one or more electrical impulses of defined duration and amplitude. In an embodiment, delivery via electroporation is performed using a system in which cells are mixed with the Cas9 molecules (e.g., eaCas9 molecules, eiCas9 molecules or eiCas9 fusion proteins) with or without gRNA molecules in a vessel connected to a device (e.g., a pump) which feeds the mixture into a cartridge, chamber or cuvette wherein one or more electrical impulses of defined duration and amplitude are applied, after which the cells are delivered to a second vessel.

[1280] Route of Administration

[1281] Systemic modes of administration include oral and parenteral routes. Parenteral routes include, by way of example, intravenous, intrarterial, intraosseous, intramuscular, intradermal, subcutaneous, intranasal and intraperitoneal routes. Components administered systemically may be modified or formulated to target the components to cells of the blood and bone marrow.

[1282] Local modes of administration include, by way of example, intra-bone marrow, intrathecal, and intra-cerebroventricular routes. In an embodiment, significantly smaller amounts of the components (compared with systemic approaches) may exert an effect when administered locally (for example, intra-bone marrow) compared to when administered systemically (for example, intravenously). Local modes of administration can reduce or eliminate the incidence of potentially toxic side effects that may occur when therapeutically effective amounts of a component are administered systemically.

[1283] In an embodiment, components described herein are delivered by intra-bone marrow injection. Injections may be made directly into the bone marrow compartment of one or more than one bone. In an embodiment, nanoparticle or viral, e.g., AAV vector, delivery is via intra-bone marrow injection.

[1284] Administration may be provided as a periodic bolus or as continuous infusion from an internal reservoir or from an external reservoir (for example, from an intravenous bag). Components may be administered locally, for example, by continuous release from a sustained release drug delivery device.

[1285] In addition, components may be formulated to permit release over a prolonged period of time. A release system can include a matrix of a biodegradable material or a material which releases the incorporated components by diffusion. The components can be homogeneously or heterogeneously distributed within the release system. A variety of release systems may be useful, however, the choice of the appropriate system will depend upon rate of release required by a particular application. Both non-degradable and degradable release systems can be used. Suitable release systems include polymers and polymeric matrices, non-polymeric matrices, or inorganic and organic excipients and diluents such as, but not limited to, calcium carbonate and sugar (for example, trehalose). Release systems may be natural or synthetic. However, synthetic release systems are preferred because generally they are more reliable, more reproducible and produce more defined release profiles. The release system material can be selected so that components having different molecular weights are released by diffusion through or degradation of the material.

[1286] Representative synthetic, biodegradable polymers include, for example: polyamides such as poly(amino acids) and poly(peptides); polyesters such as poly(lactic acid), poly(glycolic acid), poly(lactic-co-glycolic acid), and poly(caprolactone); poly(anhydrides); polyorthoesters; polycarbonates; and chemical derivatives thereof (substitutions, additions of chemical groups, for example, alkyl, alkylene, hydroxylations, oxidations, and other modifications routinely made by those skilled in the art), copolymers and mixtures thereof. Representative synthetic, non-degradable polymers include, for example: polyethers such as poly(ethylene oxide), poly(ethylene glycol), and poly(tetramethylene oxide); vinyl polymers-polyacrylates and polymethacrylates such as methyl, ethyl, other alkyl, hydroxyethyl methacrylate, acrylic and methacrylic acids, and others such as poly(vinyl alcohol), poly(vinyl pyrolidone), and poly(vinyl acetate); poly(urethanes); cellulose and its derivatives such as alkyl, hydroxyalkyl, ethers, esters, nitrocellulose, and various cellulose acetates; polysiloxanes; and any chemical derivatives thereof (substitutions, additions of chemical groups, for example, alkyl, alkylene, hydroxylations, oxidations, and other modifications routinely made by those skilled in the art), copolymers and mixtures thereof.

[1287] Poly(lactide-co-glycolide) microsphere can also be used for intraocular injection. Typically the microspheres are composed of a polymer of lactic acid and glycolic acid, which are structured to form hollow spheres. The spheres can be approximately 15-30 microns in diameter and can be loaded with components described herein.

[1288] Bi-Modal or Differential Delivery of Components

[1289] Separate delivery of the components of a Cas system, e.g., the Cas9 molecule component and the gRNA molecule component, and more particularly, delivery of the components by differing modes, can enhance performance, e.g., by improving tissue specificity and safety.

[1290] In an embodiment, the Cas9 molecule and the gRNA molecule are delivered by different modes, or as sometimes referred to herein as differential modes. Different or differential modes, as used herein, refer modes of delivery that confer different pharmacodynamic or pharmacokinetic properties on the subject component molecule, e.g., a Cas9 molecule or gRNA molecule. For example, the modes of delivery can result in different tissue distribution, different half-life, or different temporal distribution, e.g., in a selected compartment, tissue, or organ.

[1291] Some modes of delivery, e.g., delivery by a nucleic acid vector that persists in a cell, or in progeny of a cell, e.g., by autonomous replication or insertion into cellular nucleic acid, result in more persistent expression of and presence of a component. Examples include viral, e.g., adeno-associated virus or lentivirus, delivery.

[1292] By way of example, the components, e.g., a Cas9 molecule and a gRNA molecule, can be delivered by modes that differ in terms of resulting half-life or persistent of the delivered component the body, or in a particular compartment, tissue or organ. In an embodiment, a gRNA molecule can be delivered by such modes. The Cas9 molecule component can be delivered by a mode which results in less persistence or less exposure to the body or a particular compartment or tissue or organ.

[1293] More generally, in an embodiment, a first mode of delivery is used to deliver a first component and a second mode of delivery is used to deliver a second component. The first mode of delivery confers a first pharmacodynamic or pharmacokinetic property. The first pharmacodynamic property can be, e.g., distribution, persistence, or exposure, of the component, or of a nucleic acid that encodes the component, in the body, a compartment, tissue or organ. The second mode of delivery confers a second pharmacodynamic or pharmacokinetic property. The second pharmacodynamic property can be, e.g., distribution, persistence, or exposure, of the component, or of a nucleic acid that encodes the component, in the body, a compartment, tissue or organ.

[1294] In an embodiment, the first pharmacodynamic or pharmacokinetic property, e.g., distribution, persistence or exposure, is more limited than the second pharmacodynamic or pharmacokinetic property.

[1295] In an embodiment, the first mode of delivery is selected to optimize, e.g., minimize, a pharmacodynamic or pharmacokinetic property, e.g., distribution, persistence or exposure.

[1296] In an embodiment, the second mode of delivery is selected to optimize, e.g., maximize, a pharmacodynamic or pharmcokinetic property, e.g., distribution, persistence or exposure.

[1297] In an embodiment, the first mode of delivery comprises the use of a relatively persistent element, e.g., a nucleic acid, e.g., a plasmid or viral vector, e.g., an AAV or lentivirus. As such vectors are relatively persistent product transcribed from them would be relatively persistent.

[1298] In an embodiment, the second mode of delivery comprises a relatively transient element, e.g., an RNA or protein.

[1299] In an embodiment, the first component comprises gRNA, and the delivery mode is relatively persistent, e.g., the gRNA is transcribed from a plasmid or viral vector, e.g., an AAV or lentivirus. Transcription of these genes would be of little physiological consequence because the genes do not encode for a protein product, and the gRNAs are incapable of acting in isolation. The second component, a Cas9 molecule, is delivered in a transient manner, for example as mRNA or as protein, ensuring that the full Cas9 molecule/gRNA molecule complex is only present and active for a short period of time.

[1300] Furthermore, the components can be delivered in different molecular form or with different delivery vectors that complement one another to enhance safety and tissue specificity.

[1301] Use of differential delivery modes can enhance performance, safety and efficacy. E.g., the likelihood of an eventual off-target modification can be reduced. Delivery of immunogenic components, e.g., Cas9 molecules, by less persistent modes can reduce immunogenicity, as peptides from the bacterially-derived Cas enzyme are displayed on the surface of the cell by MEW molecules. A two-part delivery system can alleviate these drawbacks.

[1302] Differential delivery modes can be used to deliver components to different, but overlapping target regions. The formation active complex is minimized outside the overlap of the target regions. Thus, in an embodiment, a first component, e.g., a gRNA molecule is delivered by a first delivery mode that results in a first spatial, e.g., tissue, distribution. A second component, e.g., a Cas9 molecule is delivered by a second delivery mode that results in a second spatial, e.g., tissue, distribution. In an embodiment, the first mode comprises a first element selected from a liposome, nanoparticle, e.g., polymeric nanoparticle, and a nucleic acid, e.g., viral vector. The second mode comprises a second element selected from the group. In an embodiment, the first mode of delivery comprises a first targeting element, e.g., a cell specific receptor or an antibody, and the second mode of delivery does not include that element. In embodiment, the second mode of delivery comprises a second targeting element, e.g., a second cell specific receptor or second antibody.

[1303] When the Cas9 molecule is delivered in a virus delivery vector, a liposome, or polymeric nanoparticle, there is the potential for delivery to and therapeutic activity in multiple tissues, when it may be desirable to only target a single tissue. A two-part delivery system can resolve this challenge and enhance tissue specificity. If the gRNA molecule and the Cas9 molecule are packaged in separated delivery vehicles with distinct but overlapping tissue tropism, the fully functional complex is only be formed in the tissue that is targeted by both vectors.

### Ex Vivo Delivery

[1304] In some embodiments, components described in Table 14 are introduced into cells which are then introduced into the subject, e.g., cells are removed from a subject, manipulated ex vivo and then introduced into the subject. Methods of introducing the components can include, e.g., any of the delivery methods described in Table 15.

### VIII. Modified Nucleosides, Nucleotides, and Nucleic Acids

[1305] Modified nucleosides and modified nucleotides can be present in nucleic acids, e.g., particularly gRNA, but also other forms of RNA, e.g., mRNA, RNAi, or siRNA. As described herein, “nucleoside” is defined as a compound containing a five-carbon sugar molecule (a pentose or ribose) or derivative thereof, and an organic base, purine or pyrimidine, or a derivative thereof. As described herein, “nucleotide” is defined as a nucleoside further comprising a phosphate group.

[1306] Modified nucleosides and nucleotides can include one or more of:

[1307] (i) alteration, e.g., replacement, of one or both of the non-linking phosphate oxygens and/or of one or more of the linking phosphate oxygens in the phosphodiester backbone linkage;

[1308] (ii) alteration, e.g., replacement, of a constituent of the ribose sugar, e.g., of the 2′ hydroxyl on the ribose sugar;

[1309] (iii) wholesale replacement of the phosphate moiety with “dephospho” linkers;

[1310] (iv) modification or replacement of a naturally occurring nucleobase;

[1311] (v) replacement or modification of the ribose-phosphate backbone;

[1312] (vi) modification of the 3′ end or 5′ end of the oligonucleotide, e.g., removal, modification or replacement of a terminal phosphate group or conjugation of a moiety; and

[1313] (vii) modification of the sugar.

[1314] The modifications listed above can be combined to provide modified nucleosides and nucleotides that can have two, three, four, or more modifications. For example, a modified nucleoside or nucleotide can have a modified sugar and a modified nucleobase. In an embodiment, every base of a gRNA is modified, e.g., all bases have a modified phosphate group, e.g., all are phosphorothioate groups. In an embodiment, all, or substantially all, of the phosphate groups of a unimolecular or modular gRNA molecule are replaced with phosphorothioate groups.

[1315] In an embodiment, modified nucleotides, e.g., nucleotides having modifications as described herein, can be incorporated into a nucleic acid, e.g., a “modified nucleic acid.” In some embodiments, the modified nucleic acids comprise one, two, three or more modified nucleotides. In some embodiments, at least 5% (e.g., at least about 5%, at least about 10%, at least about 15%, at least about 20%, at least about 25%, at least about 30%, at least about 35%, at least about 40%, at least about 45%, at least about 50%, at least about 55%, at least about 60%, at least about 65%, at least about 70%, at least about 75%, at least about 80%, at least about 85%, at least about 90%, at least about 95%, or about 100%) of the positions in a modified nucleic acid are a modified nucleotides.

[1316] Unmodified nucleic acids can be prone to degradation by, e.g., cellular nucleases. For example, nucleases can hydrolyze nucleic acid phosphodiester bonds. Accordingly, in one aspect the modified nucleic acids described herein can contain one or more modified nucleosides or nucleotides, e.g., to introduce stability toward nucleases.

[1317] In some embodiments, the modified nucleosides, modified nucleotides, and modified nucleic acids described herein can exhibit a reduced innate immune response when introduced into a population of cells, both in vivo and ex vivo. The term “innate immune response” includes a cellular response to exogenous nucleic acids, including single stranded nucleic acids, generally of viral or bacterial origin, which involves the induction of cytokine expression and release, particularly the interferons, and cell death. In some embodiments, the modified nucleosides, modified nucleotides, and modified nucleic acids described herein can disrupt binding of a major groove interacting partner with the nucleic acid. In some embodiments, the modified nucleosides, modified nucleotides, and modified nucleic acids described herein can exhibit a reduced innate immune response when introduced into a population of cells, both in vivo and ex vivo, and also disrupt binding of a major groove interacting partner with the nucleic acid.

[1318] Definitions of Chemical Groups

[1319] As used herein, “alkyl” is meant to refer to a saturated hydrocarbon group which is straight-chained or branched. Example alkyl groups include methyl (Me), ethyl (Et), propyl (e.g., n-propyl and isopropyl), butyl (e.g., n-butyl, isobutyl, t-butyl), pentyl (e.g., n-pentyl, isopentyl, neopentyl), and the like. An alkyl group can contain from 1 to about 20, from 2 to about 20, from 1 to about 12, from 1 to about 8, from 1 to about 6, from 1 to about 4, or from 1 to about 3 carbon atoms.

[1320] As used herein, “aryl” refers to monocyclic or polycyclic (e.g., having 2, 3 or 4 fused rings) aromatic hydrocarbons such as, for example, phenyl, naphthyl, anthracenyl, phenanthrenyl, indanyl, indenyl, and the like. In some embodiments, aryl groups have from 6 to about 20 carbon atoms.

[1321] As used herein, “alkenyl” refers to an aliphatic group containing at least one double bond.

[1322] As used herein, “alkynyl” refers to a straight or branched hydrocarbon chain containing 2-12 carbon atoms and characterized in having one or more triple bonds. Examples of alkynyl groups include, but are not limited to, ethynyl, propargyl, and 3-hexynyl.

[1323] As used herein, “arylalkyl” or “aralkyl” refers to an alkyl moiety in which an alkyl hydrogen atom is replaced by an aryl group. Aralkyl includes groups in which more than one hydrogen atom has been replaced by an aryl group. Examples of “arylalkyl” or “aralkyl” include benzyl, 2-phenylethyl, 3-phenylpropyl, 9-fluorenyl, benzhydryl, and trityl groups.

[1324] As used herein, “cycloalkyl” refers to a cyclic, bicyclic, tricyclic, or polycyclic non-aromatic hydrocarbon groups having 3 to 12 carbons. Examples of cycloalkyl moieties include, but are not limited to, cyclopropyl, cyclopentyl, and cyclohexyl.

[1325] As used herein, “heterocyclyl” refers to a monovalent radical of a heterocyclic ring system. Representative heterocyclyls include, without limitation, tetrahydrofuranyl, tetrahydrothienyl, pyrrolidinyl, pyrrolidonyl, piperidinyl, pyrrolinyl, piperazinyl, dioxanyl, dioxolanyl, diazepinyl, oxazepinyl, thiazepinyl, and morpholinyl.

[1326] As used herein, “heteroaryl” refers to a monovalent radical of a heteroaromatic ring system. Examples of heteroaryl moieties include, but are not limited to, imidazolyl, oxazolyl, thiazolyl, triazolyl, pyrrolyl, furanyl, indolyl, thiophenyl pyrazolyl, pyridinyl, pyrazinyl, pyridazinyl, pyrimidinyl, indolizinyl, purinyl, naphthyridinyl, quinolyl, and pteridinyl.

[1327] Phosphate Backbone Modifications

[1328] The Phosphate Group

[1329] In some embodiments, the phosphate group of a modified nucleotide can be modified by replacing one or more of the oxygens with a different substituent. Further, the modified nucleotide, e.g., modified nucleotide present in a modified nucleic acid, can include the wholesale replacement of an unmodified phosphate moiety with a modified phosphate as described herein. In some embodiments, the modification of the phosphate backbone can include alterations that result in either an uncharged linker or a charged linker with unsymmetrical charge distribution.

[1330] Examples of modified phosphate groups include phosphorothioate, phosphoroselenates, borano phosphates, borano phosphate esters, hydrogen phosphonates, phosphoroamidates, alkyl or aryl phosphonates and phosphotriesters. In some embodiments, one of the non-bridging phosphate oxygen atoms in the phosphate backbone moiety can be replaced by any of the following groups: sulfur (S), selenium (Se), BR₃ (wherein R can be, e.g., hydrogen, alkyl, or aryl), C (e.g., an alkyl group, an aryl group, and the like), H, NR₂ (wherein R can be, e.g., hydrogen, alkyl, or aryl), or OR (wherein R can be, e.g., alkyl or aryl). The phosphorous atom in an unmodified phosphate group is achiral. However, replacement of one of the non-bridging oxygens with one of the above atoms or groups of atoms can render the phosphorous atom chiral; that is to say that a phosphorous atom in a phosphate group modified in this way is a stereogenic center. The stereogenic phosphorous atom can possess either the “R” configuration (herein Rp) or the “S” configuration (herein Sp).

[1331] Phosphorodithioates have both non-bridging oxygens replaced by sulfur. The phosphorus center in the phosphorodithioates is achiral which precludes the formation of oligoribonucleotide diastereomers. In some embodiments, modifications to one or both non-bridging oxygens can also include the replacement of the non-bridging oxygens with a group independently selected from S, Se, B, C, H, N, and OR (R can be, e.g., alkyl or aryl).

[1332] The phosphate linker can also be modified by replacement of a bridging oxygen, (i.e., the oxygen that links the phosphate to the nucleoside), with nitrogen (bridged phosphoroamidates), sulfur (bridged phosphorothioates) and carbon (bridged methylenephosphonates). The replacement can occur at either linking oxygen or at both of the linking oxygens.

[1333] Replacement of the Phosphate Group

[1334] The phosphate group can be replaced by non-phosphorus containing connectors. In some embodiments, the charge phosphate group can be replaced by a neutral moiety.

[1335] Examples of moieties which can replace the phosphate group can include, without limitation, e.g., methyl phosphonate, hydroxylamino, siloxane, carbonate, carboxymethyl, carbamate, amide, thioether, ethylene oxide linker, sulfonate, sulfonamide, thioformacetal, formacetal, oxime, methyleneimino, methylenemethylimino, methylenehydrazo, methylenedimethylhydrazo and methyleneoxymethylimino.

[1336] Replacement of the Ribophosphate Backbone

[1337] Scaffolds that can mimic nucleic acids can also be constructed wherein the phosphate linker and ribose sugar are replaced by nuclease resistant nucleoside or nucleotide surrogates. In some embodiments, the nucleobases can be tethered by a surrogate backbone. Examples can include, without limitation, the morpholino, cyclobutyl, pyrrolidine and peptide nucleic acid (PNA) nucleoside surrogates.

[1338] Sugar Modifications

[1339] The modified nucleosides and modified nucleotides can include one or more modifications to the sugar group. For example, the 2′ hydroxyl group (OH) can be modified or replaced with a number of different “oxy” or “deoxy” substituents. In some embodiments, modifications to the 2′ hydroxyl group can enhance the stability of the nucleic acid since the hydroxyl can no longer be deprotonated to form a 2′-alkoxide ion. The 2′-alkoxide can catalyze degradation by intramolecular nucleophilic attack on the linker phosphorus atom.

[1340] Examples of “oxy”-2′ hydroxyl group modifications can include alkoxy or aryloxy (OR, wherein “R” can be, e.g., alkyl, cycloalkyl, aryl, aralkyl, heteroaryl or a sugar); polyethyleneglycols (PEG), O(CH₂CH₂O)ₙCH₂CH₂OR wherein R can be, e.g., H or optionally substituted alkyl, and n can be an integer from 0 to 20 (e.g., from 0 to 4, from 0 to 8, from 0 to 10, from 0 to 16, from 1 to 4, from 1 to 8, from 1 to 10, from 1 to 16, from 1 to 20, from 2 to 4, from 2 to 8, from 2 to 10, from 2 to 16, from 2 to 20, from 4 to 8, from 4 to 10, from 4 to 16, and from 4 to 20). In some embodiments, the “oxy”-2′ hydroxyl group modification can include “locked” nucleic acids (LNA) in which the 2′ hydroxyl can be connected, e.g., by a C₁₋₆ alkylene or C₁₋₆ heteroalkylene bridge, to the 4′ carbon of the same ribose sugar, where exemplary bridges can include methylene, propylene, ether, or amino bridges; O-amino (wherein amino can be, e.g., NH₂; alkylamino, dialkylamino, heterocyclyl, arylamino, diarylamino, heteroarylamino, or diheteroarylamino, ethylenediamine, or polyamino) and aminoalkoxy, O(CH₂)ₙ-amino, (wherein amino can be, e.g., NH₂; alkylamino, dialkylamino, heterocyclyl, arylamino, diarylamino, heteroarylamino, or diheteroarylamino, ethylenediamine, or polyamino). In some embodiments, the “oxy”-2′ hydroxyl group modification can include the methoxyethyl group (MOE), (OCH₂CH₂OCH₃, e.g., a PEG derivative).

[1341] “Deoxy” modifications can include hydrogen (i.e. deoxyribose sugars, e.g., at the overhang portions of partially ds RNA); halo (e.g., bromo, chloro, fluoro, or iodo); amino (wherein amino can be, e.g., NH₂; alkylamino, dialkylamino, heterocyclyl, arylamino, diarylamino, heteroarylamino, diheteroarylamino, or amino acid); NH(CH₂CH₂NH)ₙCH₂CH₂-amino (wherein amino can be, e.g., as described herein), —NHC(O)R (wherein R can be, e.g., alkyl, cycloalkyl, aryl, aralkyl, heteroaryl or sugar), cyano; mercapto; alkyl-thio-alkyl; thioalkoxy; and alkyl, cycloalkyl, aryl, alkenyl and alkynyl, which may be optionally substituted with e.g., an amino as described herein.

[1342] The sugar group can also contain one or more carbons that possess the opposite stereochemical configuration than that of the corresponding carbon in ribose. Thus, a modified nucleic acid can include nucleotides containing e.g., arabinose, as the sugar. The nucleotide “monomer” can have an alpha linkage at the 1′ position on the sugar, e.g., alpha-nucleosides. The modified nucleic acids can also include “abasic” sugars, which lack a nucleobase at C-1′. These abasic sugars can also be further modified at one or more of the constituent sugar atoms. The modified nucleic acids can also include one or more sugars that are in the L form, e.g. L-nucleosides.

[1343] Generally, RNA includes the sugar group ribose, which is a 5-membered ring having an oxygen. Exemplary modified nucleosides and modified nucleotides can include, without limitation, replacement of the oxygen in ribose (e.g., with sulfur (S), selenium (Se), or alkylene, such as, e.g., methylene or ethylene); addition of a double bond (e.g., to replace ribose with cyclopentenyl or cyclohexenyl); ring contraction of ribose (e.g., to form a 4-membered ring of cyclobutane or oxetane); ring expansion of ribose (e.g., to form a 6- or 7-membered ring having an additional carbon or heteroatom, such as for example, anhydrohexitol, altritol, mannitol, cyclohexanyl, cyclohexenyl, and morpholino that also has a phosphoramidate backbone). In some embodiments, the modified nucleotides can include multicyclic forms (e.g., tricyclo; and “unlocked” forms, such as glycol nucleic acid (GNA) (e.g., R-GNA or S-GNA, where ribose is replaced by glycol units attached to phosphodiester bonds), threose nucleic acid (TNA, where ribose is replaced with α-L-threofuranosyl-(3′→2′)).

[1344] Modifications on the Nucleobase

[1345] The modified nucleosides and modified nucleotides described herein, which can be incorporated into a modified nucleic acid, can include a modified nucleobase. Examples of nucleobases include, but are not limited to, adenine (A), guanine (G), cytosine (C), and uracil (U). These nucleobases can be modified or wholly replaced to provide modified nucleosides and modified nucleotides that can be incorporated into modified nucleic acids. The nucleobase of the nucleotide can be independently selected from a purine, a pyrimidine, a purine or pyrimidine analog. In some embodiments, the nucleobase can include, for example, naturally-occurring and synthetic derivatives of a base.

[1346] Uracil

[1347] In some embodiments, the modified nucleobase is a modified uracil. Exemplary nucleobases and nucleosides having a modified uracil include without limitation pseudouridine (ψ), pyridin-4-one ribonucleoside, 5-aza-uridine, 6-aza-uridine, 2-thio-5-aza-uridine, 2-thio-uridine (s2U), 4-thio-uridine (s4U), 4-thio-pseudouridine, 2-thio-pseudouridine, 5-hydroxy-uridine (ho⁵U), 5-aminoallyl-uridine, 5-halo-uridine (e.g., 5-iodo-uridine or 5-bromo-uridine), 3-methyl-uridine (m³U), 5-methoxy-uridine (mo⁵U), uridine 5-oxyacetic acid (cmo⁵U), uridine 5-oxyacetic acid methyl ester (mcmo⁵U), 5-carboxymethyl-uridine (cm⁵U), 1-carboxymethyl-pseudouridine, 5-carboxyhydroxymethyl-uridine (chm⁵U), 5-carboxyhydroxymethyl-uridine methyl ester (mchm⁵U), 5-methoxycarbonylmethyl-uridine (mcm⁵U), 5-methoxycarbonylmethyl-2-thio-uridine (mcm⁵s2U), 5-aminomethyl-2-thio-uridine (nm⁵s2U), 5-methylaminomethyl-uridine (mnm⁵U), 5-methylaminomethyl-2-thio-uridine (mnm⁵s2U), 5-methylaminomethyl-2-seleno-uridine (mnm⁵se²U), 5-carbamoylmethyl-uridine (ncm⁵U), 5-carboxymethylaminomethyl-uridine (cmnm⁵U), 5-carboxymethylaminomethyl-2-thio-uridine (cmnm⁵s2U), 5-propynyl-uridine, 1-propynyl-pseudouridine, 5-taurinomethyl-uridine (τcm⁵U), 1-taurinomethyl-pseudouridine, 5-taurinomethyl-2-thio-uridine(τm⁵s2U), 1-taurinomethyl-4-thio-pseudouridine, 5-methyl-uridine (m⁵U, i.e., having the nucleobase deoxythymine), 1-methyl-pseudouridine 5-methyl-2-thio-uridine (m⁵s2U), 1-methyl-4-thio-pseudouridine m¹s⁴ψ) 4-thio-1-methyl-pseudouridine, 3-methyl-pseudouridine (m³Ψ), 2-thio-1-methyl-pseudouridine, 1-methyl-1-deaza-pseudouridine, 2-thio-1-methyl-1-deaza-pseudouridine, dihydrouridine (D), dihydropseudouridine, 5,6-dihydrouridine, 5-methyl-dihydrouridine (m⁵D), 2-thio-dihydrouridine, 2-thio-dihydropseudouridine, 2-methoxy-uridine, 2-methoxy-4-thio-uridine, 4-methoxy-pseudouridine, 4-methoxy-2-thio-pseudouridine, N1-methyl-pseudouridine, 3-(3-amino-3-carboxypropyl)uridine (acp³U), 1-methyl-3-(3-amino-3-carboxypropyl)pseudouridine (acp³ψ), 5-(isopentenylaminomethyl)uridine (inm⁵U), 5-(isopentenylaminomethyl)-2-thio-uridine (inm⁵s2U), α-thio-uridine, 2′-O-methyl-uridine (Um), 5,2′-O-dimethyl-uridine (m⁵Um), 2′-O-methyl-pseudouridine (ψm), 2-thio-2′-O-methyl-uridine (s2Um), 5-methoxycarbonylmethyl-2′-O-methyl-uridine (mcm⁵Um), 5-carbamoylmethyl-2′-O-methyl-uridine (ncm⁵Um), 5-carboxymethylaminomethyl-2′-O-methyl-uridine (cmnm⁵Um), 3,2′-O-dimethyl-uridine (m³Um), 5-(isopentenylaminomethyl)-2′-O-methyl-uridine (inm⁵Um), 1-thio-uridine, deoxythymidine, 2′-F-ara-uridine, 2′-F-uridine, 2′-OH-ara-uridine, 5-(2-carbomethoxyvinyl) uridine, 5-[3-(1-E-propenylamino)uridine, pyrazolo[3,4-d]pyrimidines, xanthine, and hypoxanthine.

[1348] Cytosine

[1349] In some embodiments, the modified nucleobase is a modified cytosine. Exemplary nucleobases and nucleosides having a modified cytosine include without limitation 5-aza-cytidine, 6-aza-cytidine, pseudoisocytidine, 3-methyl-cytidine (m³C), N4-acetyl-cytidine (act), 5-formyl-cytidine (f⁵C), N4-methyl-cytidine (m⁴C), 5-methyl-cytidine (m⁵C), 5-halo-cytidine (e.g., 5-iodo-cytidine), 5-hydroxymethyl-cytidine (hm⁵C), 1-methyl-pseudoisocytidine, pyrrolo-cytidine, pyrrolo-pseudoisocytidine, 2-thio-cytidine (s2C), 2-thio-5-methyl-cytidine, 4-thio-pseudoisocytidine, 4-thio-1-methyl-pseudoisocytidine, 4-thio-1-methyl-1-deaza-pseudoisocytidine, 1-methyl-1-deaza-pseudoisocytidine, zebularine, 5-aza-zebularine, 5-methyl-zebularine, 5-aza-2-thio-zebularine, 2-thio-zebularine, 2-methoxy-cytidine, 2-methoxy-5-methyl-cytidine, 4-methoxy-pseudoisocytidine, 4-methoxy-1-methyl-pseudoisocytidine, lysidine (k²C), α-thio-cytidine, 2′-O-methyl-cytidine (Cm), 5,2′-O-dimethyl-cytidine (m⁵Cm), N4-acetyl-2′-O-methyl-cytidine (ac⁴Cm), N4,2′-O-dimethyl-cytidine (m⁴Cm), 5-formyl-2′-O-methyl-cytidine (f⁵Cm), N4,N4,2′-O-trimethyl-cytidine (m⁴₂Cm), 1-thio-cytidine, 2′-F-ara-cytidine, 2′-F-cytidine, and 2′-OH-ara-cytidine.

[1350] Adenine

[1351] In some embodiments, the modified nucleobase is a modified adenine. Exemplary nucleobases and nucleosides having a modified adenine include without limitation 2-amino-purine, 2,6-diaminopurine, 2-amino-6-halo-purine (e.g., 2-amino-6-chloro-purine), 6-halo-purine (e.g., 6-chloro-purine), 2-amino-6-methyl-purine, 8-azido-adenosine, 7-deaza-adenosine, 7-deaza-8-aza-adenosine, 7-deaza-2-amino-purine, 7-deaza-8-aza-2-amino-purine, 7-deaza-2,6-diaminopurine, 7-deaza-8-aza-2,6-diaminopurine, 1-methyl-adenosine (m¹A), 2-methyl-adenosine (m²A), N6-methyl-adenosine (m⁶A), 2-methylthio-N6-methyl-adenosine (ms2 m⁶A), N6-isopentenyl-adenosine (i⁶A), 2-methylthio-N6-isopentenyl-adenosine (ms²i⁶A), N6-(cis-hydroxyisopentanyl)adenosine (io⁶A), 2-methylthio-N6-(cis-hydroxyisopentanyl)adenosine (ms2io⁶A), N6-glycinylcarbamoyl-adenosine (g⁶A), N6-threonylcarbamoyl-adenosine (t⁶A), (t⁶A), N6-methyl-N6-threonylcarbamoyl-adenosine 2-methylthio-N6-threonylcarbamoyl-adenosine (ms²g⁶A), N6,N6-dimethyl-adenosine (m⁶₂A), N6-hydroxynorvalylcarbamoyl-adenosine (hn⁶A), 2-methylthio-N6-hydroxynorvalylcarbamoyl-adenosine (ms2hn⁶A), N6-acetyl-adenosine (ac⁶A), 7-methyl-adenosine, 2-methylthio-adenosine, 2-methoxy-adenosine, α-thio-adenosine, 2′-O-methyl-adenosine (Am), N⁶,2′-O-dimethyl-adenosine (m⁶Am), N⁶-Methyl-2′-deoxyadenosine, N6,N6,2′-O-trimethyl-adenosine (m⁶₂Am), 1,2′-O-dimethyl-adenosine (m¹Am), 2′-O-ribosyladenosine (phosphate) (Ar(p)), 2-amino-N6-methyl-purine, 1-thio-adenosine, 8-azido-adenosine, 2′-F-ara-adenosine, 2′-F-adenosine, 2′-OH-ara-adenosine, and N6-(19-amino-pentaoxanonadecyl)-adenosine.

[1352] Guanine

[1353] In some embodiments, the modified nucleobase is a modified guanine. Exemplary nucleobases and nucleosides having a modified guanine include without limitation inosine (I), 1-methyl-inosine (m¹I), wyosine (imG), methylwyosine (mimG), 4-demethyl-wyosine (imG-14), isowyosine (imG2), wybutosine (yW), peroxywybutosine (o₂yW), hydroxywybutosine (OHyW), undermodified hydroxywybutosine (OHyW*), 7-deaza-guanosine, queuosine (Q), epoxyqueuosine (oQ), galactosyl-queuosine (galQ), mannosyl-queuosine (manQ), 7-cyano-7-deaza-guanosine (preQ₀), 7-aminomethyl-7-deaza-guanosine (preQ₁), archaeosine (G⁺), 7-deaza-8-aza-guanosine, 6-thio-guanosine, 6-thio-7-deaza-guanosine, 6-thio-7-deaza-8-aza-guanosine, 7-methyl-guanosine (m⁷G), 6-thio-7-methyl-guanosine, 7-methyl-inosine, 6-methoxy-guanosine, 1-methyl-guanosine (m′G), N2-methyl-guanosine (m²G), N2,N2-dimethyl-guanosine (m²₂G), N2,7-dimethyl-guanosine (m²,7G), N2, N2,7-dimethyl-guanosine (m²,2,7G), 8-oxo-guanosine, 7-methyl-8-oxo-guanosine, 1-methyl-6-thio-guanosine, N2-methyl-6-thio-guanosine, N2,N2-dimethyl-6-thio-guanosine, α-thio-guanosine, 2′-O-methyl-guanosine (Gm), N2-methyl-2′-O-methyl-guanosine (m²Gm), N2,N2-dimethyl-2′-O-methyl-guanosine (m²₂Gm), 1-methyl-2′-O-methyl-guanosine (m′Gm), N2,7-dimethyl-2′-O-methyl-guanosine (m²,7Gm), 2′-O-methyl-inosine (Im), 1,2′-O-dimethyl-inosine (m′Im), O⁶-phenyl-2′-deoxyinosine, 2′-O-ribosylguanosine (phosphate) (Gr(p)), 1-thio-guanosine, O⁶-methyl-guanosine, O⁶-Methyl-2′-deoxyguanosine, 2′-F-ara-guanosine, and 2′-F-guanosine.

[1354] Exemplary Modified gRNAs

[1355] In some embodiments, the modified nucleic acids can be modified gRNAs. It is to be understood that any of the gRNAs described herein can be modified in accordance with this section, including any gRNA that comprises a targeting domain from Tables 1A-1F, 2A-2C, 3A-3E, 4A-4C, 5A-5C, 6A-6E, 7A-7C, or 18.

[1356] As discussed above, transiently expressed or delivered nucleic acids can be prone to degradation by, e.g., cellular nucleases. Accordingly, in one aspect the modified gRNAs described herein can contain one or more modified nucleosides or nucleotides which introduce stability toward nucleases. While not wishing to be bound by theory it is also believed that certain modified gRNAs described herein can exhibit a reduced innate immune response when introduced into a population of cells, particularly the cells of the present invention. As noted above, the term “innate immune response” includes a cellular response to exogenous nucleic acids, including single stranded nucleic acids, generally of viral or bacterial origin, which involves the induction of cytokine expression and release, particularly the interferons, and cell death.

[1357] While some of the exemplary modification discussed in this section may be included at any position within the gRNA sequence, in some embodiments, a gRNA comprises a modification at or near its 5′ end (e.g., within 1-10, 1-5, or 1-2 nucleotides of its 5′ end). In some embodiments, a gRNA comprises a modification at or near its 3′ end (e.g., within 1-10, 1-5, or 1-2 nucleotides of its 3′ end). In some embodiments, a gRNA comprises both a modification at or near its 5′ end and a modification at or near its 3′ end.

[1358] In an embodiment, the 5′ end of a gRNA is modified by the inclusion of a eukaryotic mRNA cap structure or cap analog (e.g., a G(5)ppp(5)G cap analog, a m7G(5)ppp(5)G cap analog, or a 3′-O-Me-m7G(5)ppp(5)G anti reverse cap analog (ARCA)). The cap or cap analog can be included during either chemical synthesis or in vitro transcription of the gRNA.

[1359] In an embodiment, an in vitro transcribed gRNA is modified by treatment with a phosphatase (e.g., calf intestinal alkaline phosphatase) to remove the 5′ triphosphate group.

[1360] In an embodiment, the 3′ end of a gRNA is modified by the addition of one or more (e.g., 25-200) adenine (A) residues. The polyA tract can be contained in the nucleic acid (e.g., plasmid, PCR product, viral genome) encoding the gRNA, or can be added to the gRNA during chemical synthesis, or following in vitro transcription using a polyadenosine polymerase (e.g., E. coli Poly(A)Polymerase).

[1361] In an embodiment, in vitro transcribed gRNA contains both a 5′ cap structure or cap analog and a 3′ polyA tract. In an embodiment, an in vitro transcribed gRNA is modified by treatment with a phosphatase (e.g., calf intestinal alkaline phosphatase) to remove the 5′ triphosphate group and comprises a 3′ polyA tract.

[1362] In some embodiments, gRNAs can be modified at a 3′ terminal U ribose. For example, the two terminal hydroxyl groups of the U ribose can be oxidized to aldehyde groups and a concomitant opening of the ribose ring to afford a modified nucleoside as shown below:

[chemical structure]

wherein “U” can be an unmodified or modified uridine.

[1363] In another embodiment, the 3′ terminal U can be modified with a 2′3′ cyclic phosphate as shown below:

[chemical structure]

wherein “U” can be an unmodified or modified uridine.

[1364] In some embodiments, the gRNA molecules may contain 3′ nucleotides which can be stabilized against degradation, e.g., by incorporating one or more of the modified nucleotides described herein. In this embodiment, e.g., uridines can be replaced with modified uridines, e.g., 5-(2-amino)propyl uridine, and 5-bromo uridine, or with any of the modified uridines described herein; adenosines and guanosines can be replaced with modified adenosines and guanosines, e.g., with modifications at the 8-position, e.g., 8-bromo guanosine, or with any of the modified adenosines or guanosines described herein.

[1365] In some embodiments, sugar-modified ribonucleotides can be incorporated into the gRNA, e.g., wherein the 2′ OH-group is replaced by a group selected from H, —OR, —R (wherein R can be, e.g., alkyl, cycloalkyl, aryl, aralkyl, heteroaryl or sugar), halo, —SH, —SR (wherein R can be, e.g., alkyl, cycloalkyl, aryl, aralkyl, heteroaryl or sugar), amino (wherein amino can be, e.g., NH₂; alkylamino, dialkylamino, heterocyclyl, arylamino, diarylamino, heteroarylamino, diheteroarylamino, or amino acid); or cyano (—CN). In some embodiments, the phosphate backbone can be modified as described herein, e.g., with a phosphothioate group. In some embodiments, one or more of the nucleotides of the gRNA can each independently be a modified or unmodified nucleotide including, but not limited to 2′-sugar modified, such as, 2′-O-methyl, 2′-O-methoxyethyl, or 2′-Fluoro modified including, e.g., 2′-F or 2′-O-methyl, adenosine (A), 2′-F or 2′-O-methyl, cytidine (C), 2′-F or 2′-O-methyl, uridine (U), 2′-F or 2′-O-methyl, thymidine (T), 2′-F or 2′-O-methyl, guanosine (G), 2′-O-methoxyethyl-5-methyluridine (Teo), 2′-O-methoxyethyladenosine (Aeo), 2′-O-methoxyethyl-5-methylcytidine (m5Ceo), and any combinations thereof.

[1366] In some embodiments, a gRNA can include “locked” nucleic acids (LNA) in which the 2′ OH-group can be connected, e.g., by a C1-6 alkylene or C1-6 heteroalkylene bridge, to the 4′ carbon of the same ribose sugar, where exemplary bridges can include methylene, propylene, ether, or amino bridges; O-amino (wherein amino can be, e.g., NH₂; alkylamino, dialkylamino, heterocyclyl, arylamino, diarylamino, heteroarylamino, or diheteroarylamino, ethylenediamine, or polyamino) and aminoalkoxy or O(CH₂)ₙ-amino (wherein amino can be, e.g., NH₂; alkylamino, dialkylamino, heterocyclyl, arylamino, diarylamino, heteroarylamino, or diheteroarylamino, ethylenediamine, or polyamino).

[1367] In some embodiments, a gRNA can include a modified nucleotide which is multicyclic (e.g., tricyclo; and “unlocked” forms, such as glycol nucleic acid (GNA) (e.g., R-GNA or S-GNA, where ribose is replaced by glycol units attached to phosphodiester bonds), or threose nucleic acid (TNA, where ribose is replaced with α-L-threofuranosyl-(3′→2′)).

[1368] Generally, gRNA molecules include the sugar group ribose, which is a 5-membered ring having an oxygen. Exemplary modified gRNAs can include, without limitation, replacement of the oxygen in ribose (e.g., with sulfur (S), selenium (Se), or alkylene, such as, e.g., methylene or ethylene); addition of a double bond (e.g., to replace ribose with cyclopentenyl or cyclohexenyl); ring contraction of ribose (e.g., to form a 4-membered ring of cyclobutane or oxetane); ring expansion of ribose (e.g., to form a 6- or 7-membered ring having an additional carbon or heteroatom, such as for example, anhydrohexitol, altritol, mannitol, cyclohexanyl, cyclohexenyl, and morpholino that also has a phosphoramidate backbone). Although the majority of sugar analog alterations are localized to the 2′ position, other sites are amenable to modification, including the 4′ position. In an embodiment, a gRNA comprises a 4′-S, 4′-Se or a 4′-C-aminomethyl-2′-O-Me modification.

[1369] In some embodiments, deaza nucleotides, e.g., 7-deaza-adenosine, can be incorporated into the gRNA. In some embodiments, 0- and N-alkylated nucleotides, e.g., N6-methyl adenosine, can be incorporated into the gRNA. In some embodiments, one or more or all of the nucleotides in a gRNA molecule are deoxynucleotides.

[1370] miRNA Binding Sites

[1371] microRNAs (or miRNAs) are naturally occurring cellular 19-25 nucleotide long noncoding RNAs. They bind to nucleic acid molecules having an appropriate miRNA binding site, e.g., in the 3′ UTR of an mRNA, and down-regulate gene expression. While not wishing to be bound by theory it is believed that the down regulation is either by reducing nucleic acid molecule stability or by inhibiting translation. An RNA species disclosed herein, e.g., an mRNA encoding Cas9 can comprise an miRNA binding site, e.g., in its 3′UTR. The miRNA binding site can be selected to promote down regulation of expression is a selected cell type. By way of example, the incorporation of a binding site for miR-122, a microRNA abundant in liver, can inhibit the expression of the gene of interest in the liver.

### EXAMPLES

[1372] The following Examples are merely illustrative and are not intended to limit the scope or content of the invention in any way.

### Example 1

### Evaluation of Candidate Guide RNAs (gRNAs)

[1373] The suitability of candidate gRNAs can be evaluated as described in this example. Although described for a chimeric gRNA, the approach can also be used to evaluate modular gRNAs.

[1374] Cloning gRNAs into Vectors

[1375] For each gRNA, a pair of overlapping oligonucleotides is designed and obtained. Oligonucleotides are annealed and ligated into a digested vector backbone containing an upstream U6 promoter and the remaining sequence of a long chimeric gRNA. Plasmid is sequence-verified and prepped to generate sufficient amounts of transfection-quality DNA. Alternate promoters maybe used to drive in vivo transcription (e.g. H1 promoter) or for in vitro transcription (e.g., a T7 promoter).

[1376] Cloning gRNAs in Linear dsDNA Molecule (STITCHR)

[1377] For each gRNA, a single oligonucleotide is designed and obtained. The U6 promoter and the gRNA scaffold (e.g. including everything except the targeting domain, e.g., including sequences derived from the crRNA and tracrRNA, e.g., including a first complementarity domain; a linking domain; a second complementarity domain; a proximal domain; and a tail domain) are separately PCR amplified and purified as dsDNA molecules. The gRNA-specific oligonucleotide is used in a PCR reaction to stitch together the U6 and the gRNA scaffold, linked by the targeting domain specified in the oligonucleotide. Resulting dsDNA molecule (STITCHR product) is purified for transfection. Alternate promoters may be used to drive in vivo transcription (e.g., H1 promoter) or for in vitro transcription (e.g., T7 promoter). Any gRNA scaffold may be used to create gRNAs compatible with Cas9s from any bacterial species.

[1378] Initial gRNA Screen

[1379] Each gRNA to be tested is transfected, along with a plasmid expressing Cas9 and a small amount of a GFP-expressing plasmid into human cells. In preliminary experiments, these cells can be immortalized human cell lines such as 293T, K562 or U2OS. Alternatively, primary human cells may be used. In this case, cells may be relevant to the eventual therapeutic cell target (e.g., a circulating blood cell, e.g., a T cell (e.g., a CD4+ T cell, a CD8+ T cell, a helper T cell, a regulatory T cell, a cytotoxic T cell, a memory T cell, a T cell precursor or a natural killer T cell)). The use of primary cells similar to the potential therapeutic target cell population may provide important information on gene targeting rates in the context of endogenous chromatin and gene expression.

[1380] Transfection may be performed using lipid transfection (such as Lipofectamine or Fugene) or by electroporation (such as Lonza Nucleofection). Following transfection, GFP expression can be determined either by fluorescence microscopy or by flow cytometry to confirm consistent and high levels of transfection. These preliminary transfections can comprise different gRNAs and different targeting approaches (17-mers, 20-mers, nuclease, dual-nickase, etc.) to determine which gRNAs/combinations of gRNAs give the greatest activity.

[1381] Efficiency of cleavage with each gRNA may be assessed by measuring NHEJ-induced indel formation at the target locus by a T7E1-type assay or by sequencing. Alternatively, other mismatch-sensitive enzymes, such as Cell/Surveyor nuclease, may also be used.

[1382] For the T7E1 assay, PCR amplicons are approximately 500-700 bp with the intended cut site placed asymmetrically in the amplicon. Following amplification, purification and size-verification of PCR products, DNA is denatured and re-hybridized by heating to 95° C. and then slowly cooling. Hybridized PCR products are then digested with T7 Endonuclease I (or other mismatch-sensitive enzyme) which recognizes and cleaves non-perfectly matched DNA. If indels are present in the original template DNA, when the amplicons are denatured and re-annealed, this results in the hybridization of DNA strands harboring different indels and therefore lead to double-stranded DNA that is not perfectly matched. Digestion products may be visualized by gel electrophoresis or by capillary electrophoresis. The fraction of DNA that is cleaved (density of cleavage products divided by the density of cleaved and uncleaved) may be used to estimate a percent NHEJ using the following equation: % NHEJ=(1−(1−fraction cleaved)^{1/2}). The T7E1 assay is sensitive down to about 2-5% NHEJ.

[1383] Sequencing may be used instead of, or in addition to, the T7E1 assay. For Sanger sequencing, purified PCR amplicons are cloned into a plasmid backbone, transformed, miniprepped and sequenced with a single primer. Sanger sequencing may be used for determining the exact nature of indels after determining the NHEJ rate by T7E1.

[1384] Sequencing may also be performed using next generation sequencing techniques. When using next generation sequencing, amplicons may be 300-500 bp with the intended cut site placed asymmetrically. Following PCR, next generation sequencing adapters and barcodes (for example Illumina multiplex adapters and indexes) may be added to the ends of the amplicon, e.g., for use in high throughput sequencing (for example on an Illumina MiSeq). This method allows for detection of very low NHEJ rates.

### Example 2

### Assessment of Gene Targeting by NHEJ

[1385] The gRNAs that induce the greatest levels of NHEJ in initial tests can be selected for further evaluation of gene targeting efficiency. In this case, cells are derived from disease subjects and, therefore, harbor the relevant mutation.

[1386] Following transfection (usually 2-3 days post-transfection) genomic DNA may be isolated from a bulk population of transfected cells and PCR may be used to amplify the target region. Following PCR, gene targeting efficiency to generate the desired mutations (either knockout of a target gene or removal of a target sequence motif) may be determined by sequencing. For Sanger sequencing, PCR amplicons may be 500-700 bp long. For next generation sequencing, PCR amplicons may be 300-500 bp long. If the goal is to knockout gene function, sequencing may be used to assess what percent of alleles have undergone NHEJ-induced indels that result in a frameshift or large deletion or insertion that would be expected to destroy gene function. If the goal is to remove a specific sequence motif, sequencing may be used to assess what percent of alleles have undergone NHEJ-induced deletions that span this sequence.

### Example 3

### Screening of gRNAs for CCR5

[1387] In order to identify gRNAs with the highest on target NHEJ efficiency, 24 S. pyogenes gRNAs were selected for testing (Table 18). A DNA plasmid comprised of an exemplary gRNA (including the target region and appropriate TRACR sequence) under the control of a U6 promoter was generated by restriction enzyme cloning. This DNA template was subsequently transfected into 293 cells using Lipofectamine 3000 along with a DNA plasmid encoding the appropriate Cas9 downstream of a CMV promoter. Genomic DNA was isolated from the cells 48-72 hours post transfection. To determine the rate of modification at the CCR5 gene, the target region was amplified using a locus PCR with the following primers (CCR5 exon 3 5′ primer: TATCAAGTGTCAAGTCCAATCTATGACATC (SEQ ID NO: 5752); CCR5 exon 3 3′ primer: GGAAATTCTTCCAGAATTGATACTGACTG (SEQ ID NO: 5753). After PCR amplification, a T7E1 assay was performed on the PCR product. Briefly, this assay involves melting the PCR product followed by a re-annealing step. If gene modification has occurred, there will exist double stranded products that are not perfect matches due to some frequency of insertions or deletions. These double stranded products are sensitive to cleavage by a T7 endonuclease 1 enzyme at the site of mismatch. Therefore, the efficiency of cutting by the Cas9/gRNA complex can be determined by analyzing the amount of T7E1 cleavage. The formula that is used to provide a measure of % NHEJ from the T7E1 cutting is the following: 100*(1−((1−(fraction cleaved))̂0.5)). The results of this analysis are shown in FIG. 10.

TABLE 18

| gRNA | Targeting Domain Sequence | SEQ ID NO |
|---|---|---|
| CCR5-1 | GCCUCCGCUCUACUCAC | 396 |
| CCR5-3 | GCCGCCCAGUGGGACUU | 397 |
| CCR5-4 | GCAUAGUGAGCCCAGAA | 401 |
| CCR5-6 | GCCUUUUGCAGUUUAUC | 409 |
| CCR5-10 | GACAAUCGAUAGGUACC | 399 |
| CCR5-13 | GACAAGUGUGAUCACUU | 404 |
| CCR5-14 | GGUACCUAUCGAUUGUC | 402 |
| CCR5-43 | GCUGCCGCCCAGUGGGACUU | 388 |
| CCR5-45 | GGUACCUAUCGAUUGUCAGG | 394 |
| CCR5-47 | GCAGCAUAGUGAGCCCAGAA | 393 |
| CCR5-49 | GUGAGUAGAGCGGAGGCAGG | 395 |
| CCR5-52 | AUGUGUCAACUCUUGAC | 398 |
| CCR5-53 | UUGACAGGGCUCUAUUUUAU | 499 |
| CCR5-54 | ACAGGGCUCUAUUUUAU | 5749 |
| CCR5-55 | UCAUCCUCCUGACAAUCGAU | 477 |
| CCR5-56 | UCCUCCUGACAAUCGAU | 5750 |
| CCR5-57 | CCUGACAAUCGAUAGGUACC | 463 |
| CCR5-58 | GGUGACAAGUGUGAUCACUU | 4469 |
| CCR5-60 | CCAGGUACCUAUCGAUUGUC | 391 |
| CCR5-61 | ACCUAUCGAUUGUCAGG | 5751 |
| CCR5-62 | UCAGCCUUUUGCAGUUUAUC | 476 |
| CCR5-64 | CACAUUGAUUUUUUGGC | 400 |
| CCR5-65 | AGUAGAGCGGAGGCAGG | 442 |
| CCR5-66 | CCUGCCUCCGCUCUACUCAC | 387 |

### Example 4

### Assessment of Gene Targeting in Hematopoietic Stem Cells

[1388] Transplantation of autologous CD34⁺ hematopoietic stem cells (HSCs) that have been genetically modified to prevent expression of the wild-type CCR5 gene product prevents entry of the HIV virus HSC progeny that are normally susceptible to HIV infection (e.g., macrophages and CD4 T-lymphocytes). Clinically, transplantation of HSCs that contain a genetic mutation in the coding sequence for the CCR5 chemokine receptor has been shown to control HIV infection long-term (Witter et. al, New England Journal of Medicine, 2009; 360(7):692-698). Genome editing with the CRISPR/Cas9 platform precisely alters endogenous gene targets by creating an indel at the targeted cut site that can lead to knock down of gene expression at the edited locus. In this Example, genome editing in human mobilized peripheral blood CD34⁺ HSCs after co-delivery of Cas9 with gRNA targeting the CCR5 locus was evaluated to induce gene editing in CD34⁺ cells.

[1389] Human CD34⁺ HSCs cells from mobilized peripheral blood (AllCells) were thawed into StemSpan Serum-Free Expansion Medium (SFEM™, StemCell Technologies) containing 100 ng/mL each of the following cytokines: human stem cell factor (SCF), thrombopoietin (TPO), and flt-3 ligand (FL) (all from Peprotech). Cells were grown for 3 days in a humidified incubator and 5% CO₂ 20% O₂. On day 3, media was replaced with fresh Stemspan-SFEM™ supplemented with human SCF, TPO, FL and 40 nM of the small molecule UM171 (Xcess Bio), a human HSC self-renewal agonist which has been shown to support robust expansion of human HSCs (Fares et. al, Science, 2014; 345(6203):1509-1512). The published use of UM171 involved prolonged exposure of HSCs to the small molecule for ex vivo expansion of HSCs. In the current experiment, HSCs were exposed to UM171 for 2 hours before and 24 hours after delivery of Cas9 and gRNA plasmid DNA. This UM171 treatment protocol was based on the pilot studies that indicated acute pre-treatment with UM171 before lentivirus vector mediated gene delivery improved HSC viability compared to HSCs treated with vehicle (dimethylsulfoxide, DMSO, Sigma) alone. After the 2-hour pretreatment with UM171, 1 million CD34⁺ HSCs were Nucleofected™ with the Amaxa™ 4D Nucleofector™ device (Lonza), Program EO100 using components of the P3 Primary Cell 4D-Nucleofector Kit™ (Lonza) according to the manufacturer's instructions. Briefly, one million cells were suspended in Nucleofector™ solution and the following amounts of plasmid DNA were added to the cell suspension: 1250 ng plasmid expressing CCR5 gRNA (CCR5-43) from the human U6 promoter and 3750 ng plasmid expressing wild-type S. pyogenes Cas 9 transcriptionally regulated by the CMV promoter. After Nucleofection™, cells were plated into Stemspan-SFEM™ supplemented with SCF, TPO, FL and 40 nM UM171. After overnight incubation, HSCs were plated in Stemspan-SFEM™ plus cytokines without UM171. At 96 hours after Nucleofection™, CD34⁺ cells were counted for by trypan blue exclusion and divided into 3 portions for the following analyses: a) flow cytometry analysis for assessment of viability by co-staining with 7-Aminoactinomycin-D (7-AAD) and allophycocyanin (APC)-conjugated Annexin-V antibody (ebioscience); b) flow cytometry analysis for maintenance of HSC phenotype (after co-staining with phycoerythrin (PE)-conjugated anti-human CD34 antibody and fluorescein isothicyanate (FITC)-conjugated anti-human CD90, both from BD Bioscience; c) hematopoietic colony forming cell (CFC) analysis by plating 1500 cells in semi-solid methylcellulose based Methocult medium (StemCell Technologies) that supports differentiation of erythroid and myeloid blood cell colonies from HSCs and serves as a surrogate assay to evaluate HSC multipotency and differentiation potential ex vivo; d) genomic DNA analysis for detection of editing at the CCR5 locus. Genomic DNA was extracted from HSCs 96 hours after Nucleofection™, and CCR5 locus-specific PCR reactions were performed.

[1390] HSCs that were Nucleofected™ with Cas9 and CCR5 gRNA plasmids after pre-treatment with UM171 exhibited >93% viability (7-AAD⁻ AnnexinV⁻) and maintained co-expression of CD34 and CD90, as determined by flow cytometry analysis (FIG. 11). In addition, the UM171-treated Nucleofected™ cells were able to divide, as there was an increase in cell number with a fold-expansion similar to the level achieved win unelectroporated HSCS (Table 19). In contrast, HSCs Nucleofected™ without UM171 pre-treatment had decreased viability and cell did not expand in culture.

[1391] Table 19 shows that UM171 preserved CD34+ HSC viability after Nucleofection™ with wild type Cas9 and CCR5-43 gRNA plasmid DNA (96 hours)

TABLE 19

| | Fold expansion of |
|---|---|
| Condition | CD34⁺ cells (96 hours) |
| No Nucleofection ™ | 1.6 |
| Nucleofection ™ + UM171 treatment | 1.5 |
| Nucleofection ™ + vehicle treatment | 0.6 |

[1392] In order to detect indels at the CCR5 locus, T7E1 assays were performed on CCR5 locus-specific PCR products that were amplified from genomic DNA samples from Nucleofected™ CD34⁺ HSCs and then percentage of indels detected at the CCR5 locus was calculated. Twenty percent indels was detected in the genomic DNA from CD34⁺ HSCs Nucleofected™ with Cas9 and CCR5 gRNA plasmids after pre-treatment with UM171.

[1393] To evaluate maintenance of HSC potency and differentiation potential, two weeks after plating CD34⁺ HSCs in CFC assays, hematopoietic activity was quantified based on scoring the HSC progeny by enumerating the total number of hematopoietic colony forming units (CFU) and the frequencies of specific blood cell phenotypes, including: mixed myeloid/erythroid (Granulocyte-erythroid-monocyte macrophage, CFU-GEMM), myeloid (CFU-macrophage (M), granulocyte-macrophage (CFU-GM)) and erythroid (CFU-E) colonies. CD34⁺ HSCs that were Nucleofected™ after UM171 pre-treatment maintained CFC potential compared to un-Nucleofected™ HSCs (Table 20). In contrast, CD34⁺ HSCs that were Nucleofected™ without UM171 pre-treatment had reduced CFC potential (lower total CFC counts and reduced numbers of mixed-phenotype colonies (CFU-GEMM) and erythroid colonies (CFU-E)) in comparison to un-Nucleofected™ CD34⁺ HSCs.

[1394] Table 20 shows that UM171 preserved CD34+ HSC viability after Nucleofection™ with wild-type Cas9 and CCR5-43 gRNA plasmid DNA (two weeks).

TABLE 20

| | Number of colony forming units per 1500 | | | | | |
|---|---|---|---|---|---|---|
| | CD34⁺ HSCs plated | | | | | |
| Condition | E | G | M | GM | GEMM | Total |
| No Nucleofection ™ | 64 | 3 | 88 | 5 | 11 | 171 |
| Nucleofection ™ + UM171 | 92 | 40 | 64 | 32 | 20 | 228 |
| Nucleofection ™ + vehicle | 18 | 22 | 6 | 1 | 1 | 28 |

[1395] Delivery of co-delivery wild-type S. pyogenes Cas9 and a single CCR5 gRNA plasmid DNA supported 20% genome editing of CD34⁺ HSCs, without loss of cell viability, multipotency, self-renewal and differentiation potential. Pre-treatment and short-term (24-hour) co-culture with the HSC self-renewal agonist UM171 was critical for maintenance of HSC survival and proliferation after Nucleofection™ with Cas9/gRNA DNA. Clinically, transplantation of HSCs that contain a genetic mutation in the CCR5 gene generated by CRISPR/Cas9 related methods can be used to achieve long term control of HIV infection.

### INCORPORATION BY REFERENCE

[1396] All publications, patents, and patent applications mentioned herein are hereby incorporated by reference in their entirety as if each individual publication, patent or patent application was specifically and individually indicated to be incorporated by reference. In case of conflict, the present application, including any definitions herein, will control.

### EQUIVALENTS

[1397] Those skilled in the art will recognize, or be able to ascertain using no more than routine experimentation, many equivalents to the specific embodiments of the invention described herein. Such equivalents are intended to be encompassed by the following claims.

[1398] Other embodiments are within the following claims.

The application's sequence listing, which the Patent Office published only in electronic form, follows.

SEQUENCE LISTING (5753 sequences)

SEQ ID NO: 1 - protein, 1344 aa, Streptococcus mutans
KKPYSIGLDIGTNSVGWAVVTDDYKVPAKKMKVLGNTDKSHIEKNLLGALLFDSGNTAEDRRLKRTARRRYTRRRNRILYLQEIFSEEMGKVDDSFFHRLEDSFLVTEDKRGERHPIFGNLEEEVKYHENFPTIYHLRQYLADNPEKVDLRLVYLALAHIIKFRGHFLIEGKFDTRNNDVQRLFQEFLAVYDNTFENSSLQEQNVQVEEILTDKISKSAKKDRVLKLFPNEKSNGRFAEFLKLIVGNQADFKKHFELEEKAPLQFSKDTYEEELEVLLAQIGDNYAELFLSAKKLYDSILLSGILTVTDVGTKAPLSASMIQRYNEHQMDLAQLKQFIRQKLSDKYNEVFSDVSKDGYAGYIDGKTNQEAFYKYLKGLLNKIEGSGYFLDKIEREDFLRKQRTFDNGSIPHQIHLQEMRAIIRRQAEFYPFLADNQDRIEKLLTFRIPYYVGPLARGKSDFAWLSRKSADKITPWNFDEIVDKESSAEAFINRMTNYDLYLPNQKVLPKHSLLYEKFTVYNELTKVKYKTEQGKTAFFDANMKQEIFDGVFKVYRKVTKDKLMDFLEKEFDEFRIVDLTGLDKENKVFNASYGTYHDLCKILDKDFLDNSKNEKILEDIVLTLTLFEDREMIRKRLENYSDLLTKEQVKKLERRHYTGWGRLSAELIHGIRNKESRKTILDYLIDDGNSNRNFMQLINDDALSFKEEIAKAQVIGETDNLNQVVSDIAGSPAIKKGILQSLKIVDELVKIMGHQPENIVVEMARENQFTNQGRRNSQQRLKGLTDSIKEFGSQILKEHPVENSQLQNDRLFLYYLQNGRDMYTGEELDIDYLSQYDIDHIIPQAFIKDNSIDNRVLTSSKENRGKSDDVPSKDVVRKMKSYWSKLLSAKLITQRKFDNLTKAERGGLTDDDKAGFIKRQLVETRQITKHVARILDERFNTETDENNKKIRQVKIVTLKSNLVSNFRKEFELYKVREINDYHHAHDAYLNAVIGKALLGVYPQLEPEFVYGDYPHFHGHKENKATAKKFFYSNIMNFFKKDDVRTDKNGEIIWKKDEHISNIKKVLSYPQVNIVKKVEEQTGGFSKESILPKGNSDKLIPRKTKKFYWDTKKYGGFDSPIVAYSILVIADIEKGKSKKLKTVKALVGVTIMEKMTFERDPVAFLERKGYRNVQEENIIKLPKYSLFKLENGRKRLLASARELQKGNEIVLPNHLGTLLYHAKNIHKVDEPKHLDYVDKHKDEFKELLDVVSNFSKKYTLAEGNLEKIKELYAQNNGEDLKELASSFINLLTFTAIGAPATFKFFDKNIDRKRYTSTTEILNATLIHQSITGLYETRIDLNKLGGD

SEQ ID NO: 2 - protein, 1367 aa, Streptococcus pyogenes
DKKYSIGLDIGTNSVGWAVITDEYKVPSKKFKVLGNTDRHSIKKNLIGALLFDSGETAEATRLKRTARRRYTRRKNRICYLQEIFSNEMAKVDDSFFHRLEESFLVEEDKKHERHPIFGNIVDEVAYHEKYPTIYHLRKKLVDSTDKADLRLIYLALAHMIKFRGHFLIEGDLNPDNSDVDKLFIQLVQTYNQLFEENPINASGVDAKAILSARLSKSRRLENLIAQLPGEKKNGLFGNLIALSLGLTPNFKSNFDLAEDAKLQLSKDTYDDDLDNLLAQIGDQYADLFLAAKNLSDAILLSDILRVNTEITKAPLSASMIKRYDEHHQDLTLLKALVRQQLPEKYKEIFFDQSKNGYAGYIDGGASQEEFYKFIKPILEKMDGTEELLVKLNREDLLRKQRTFDNGSIPHQIHLGELHAILRRQEDFYPFLKDNREKIEKILTFRIPYYVGPLARGNSRFAWMTRKSEETITPWNFEEVVDKGASAQSFIERMTNFDKNLPNEKVLPKHSLLYEYFTVYNELTKVKYVTEGMRKPAFLSGEQKKAIVDLLFKTNRKVTVKQLKEDYFKKIECFDSVEISGVEDRFNASLGTYHDLLKIIKDKDFLDNEENEDILEDIVLTLTLFEDREMIEERLKTYAHLFDDKVMKQLKRRRYTGWGRLSRKLINGIRDKQSGKTILDFLKSDGFANRNFMQLIHDDSLTFKEDIQKAQVSGQGDSLHEHIANLAGSPAIKKGILQTVKVVDELVKVMGRHKPENIVIEMARENQTTQKGQKNSRERMKRIEEGIKELGSQILKEHPVENTQLQNEKLYLYYLQNGRDMYVDQELDINRLSDYDVDHIVPQSFLKDDSIDNKVLTRSDKNRGKSDNVPSEEVVKKMKNYWRQLLNAKLITQRKFDNLTKAERGGLSELDKAGFIKRQLVETRQITKHVAQILDSRMNTKYDENDKLIREVKVITLKSKLVSDFRKDFQFYKVREINNYHHAHDAYLNAVVGTALIKKYPKLESEFVYGDYKVYDVRKMIAKSEQEIGKATAKYFFYSNIMNFFKTEITLANGEIRKRPLIETNGETGEIVWDKGRDFATVRKVLSMPQVNIVKKTEVQTGGFSKESILPKRNSDKLIARKKDWDPKKYGGFDSPTVAYSVLVVAKVEKGKSKKLKSVKELLGITIMERSSFEKNPIDFLEAKGYKEVKKDLIIKLPKYSLFELENGRKRMLASAGELQKGNELALPSKYVNFLYLASHYEKLKGSPEDNEQKQLFVEQHKHYLDEIIEQISEFSKRVILADANLDKVLSAYNKHRDKPIREQAENIIHLFTLTNLGAPAAFKYFDTTIDRKRYTSTKEVLDATLIHQSITGLYETRIDLSQLGGD

SEQ ID NO: 3 - protein, 1387 aa, Streptococcus thermophilus
TKPYSIGLDIGTNSVGWAVTTDNYKVPSKKMKVLGNTSKKYIKKNLLGVLLFDSGITAEGRRLKRTARRRYTRRRNRILYLQEIFSTEMATLDDAFFQRLDDSFLVPDDKRDSKYPIFGNLVEEKAYHDEFPTIYHLRKYLADSTKKADLRLVYLALAHMIKYRGHFLIEGEFNSKNNDIQKNFQDFLDTYNAIFESDLSLENSKQLEEIVKDKISKLEKKDRILKLFPGEKNSGIFSEFLKLIVGNQADFRKCFNLDEKASLHFSKESYDEDLETLLGYIGDDYSDVFLKAKKLYDAILLSGFLTVTDNETEAPLSSAMIKRYNEHKEDLALLKEYIRNISLKTYNEVFKDDTKNGYAGYIDGKTNQEDFYVYLKKLLAEFEGADYFLEKIDREDFLRKQRTFDNGSIPYQIHLQEMRAILDKQAKFYPFLAKNKERIEKILTFRIPYYVGPLARGNSDFAWSIRKRNEKITPWNFEDVIDKESSAEAFINRMTSFDLYLPEEKVLPKHSLLYETFNVYNELTKVRFIAESMRDYQFLDSKQKKDIVRLYFKDKRKVTDKDIIEYLHAIYGYDGIELKGIEKQFNSSLSTYHDLLNIINDKEFLDDSSNEAIIEEIIHTLTIFEDREMIKQRLSKFENIFDKSVLKKLSRRHYTGWGKLSAKLINGIRDEKSGNTILDYLIDDGISNRNFMQLIHDDALSFKKKIQKAQIIGDEDKGNIKEVVKSLPGSPAIKKGILQSIKIVDELVKVMGGRKPESIVVEMARENQYTNQGKSNSQQRLKRLEKSLKELGSKILKENIPAKLSKIDNNALQNDRLYLYYLQNGKDMYTGDDLDIDRLSNYDIDHIIPQAFLKDNSIDNKVLVSSASNRGKSDDVPSLEVVKKRKTFWYQLLKSKLISQRKFDNLTKAERGGLSPEDKAGFIQRQLVETRQITKHVARLLDEKFNNKKDENNRAVRTVKIITLKSTLVSQFRKDFELYKVREINDFHHAHDAYLNAVVASALLKKYPKLEPEFVYGDYPKYNSFRERKSATEKVYFYSNIMNIFKKSISLADGRVIERPLIEVNEETGESVWNKESDLATVRRVLSYPQVNVVKKVEEQNHGLDRGKPKGLFNANLSSKPKPNSNENLVGAKEYLDPKKYGGYAGISNSFTVLVKGTIEKGAKKKITNVLEFQGISILDRINYRKDKLNFLLEKGYKDIELIIELPKYSLFELSDGSRRMLASILSTNNKRGEIHKGNQIFLSQKFVKLLYHAKRISNTINENHRKYVENHKKEFEELFYYILEFNENYVGAKKNGKLLNSAFQSWQNHSIDELCSSFIGPTGSERKGLFELTSRGSAADFEFLGVKIPRYRDYTPSSLLKDATLIHQSVTGLYETRIDLAKLGEG

SEQ ID NO: 4 - protein, 1333 aa, Listeria innocua
KKPYTIGLDIGTNSVGWAVLTDQYDLVKRKMKIAGDSEKKQIKKNFWGVRLFDEGQTAADRRMARTARRRIERRRNRISYLQGIFAEEMSKTDANFFCRLSDSFYVDNEKRNSRHPFFATIEEEVEYHKNYPTIYHLREELVNSSEKADLRLVYLALAHIIKYRGNFLIEGALDTQNTSVDGIYKQFIQTYNQVFASGIEDGSLKKLEDNKDVAKILVEKVTRKEKLERILKLYPGEKSAGMFAQFISLIVGSKGNFQKPFDLIEKSDIECAKDSYEEDLESLLALIGDEYAELFVAAKNAYSAVVLSSIITVAETETNAKLSASMIERFDTHEEDLGELKAFIKLHLPKHYEEIFSNTEKHGYAGYIDGKTKQADFYKYMKMTLENIEGADYFIAKIEKENFLRKQRTFDNGAIPHQLHLEELEAILHQQAKYYPFLKENYDKIKSLVTFRIPYFVGPLANGQSEFAWLTRKADGEIRPWNIEEKVDFGKSAVDFIEKMTNKDTYLPKENVLPKHSLCYQKYLVYNELTKVRYINDQGKTSYFSGQEKEQIFNDLFKQKRKVKKKDLELFLRNMSHVESPTIEGLEDSFNSSYSTYHDLLKVGIKQEILDNPVNTEMLENIVKILTVFEDKRMIKEQLQQFSDVLDGVVLKKLERRHYTGWGRLSAKLLMGIRDKQSHLTILDYLMNDDGLNRNLMQLINDSNLSFKSIIEKEQVTTADKDIQSIVADLAGSPAIKKGILQSLKIVDELVSVMGYPPQTIVVEMARENQTTGKGKNNSRPRYKSLEKAIKEFGSQILKEHPTDNQELRNNRLYLYYLQNGKDMYTGQDLDIHNLSNYDIDHIVPQSFITDNSIDNLVLTSSAGNREKGDDVPPLEIVRKRKVFWEKLYQGNLMSKRKFDYLTKAERGGLTEADKARFIHRQLVETRQITKNVANILHQRFNYEKDDHGNTMKQVRIVTLKSALVSQFRKQFQLYKVRDVNDYHHAHDAYLNGVVANTLLKVYPQLEPEFVYGDYHQFDWFKANKATAKKQFYTNIMLFFAQKDRIIDENGEILWDKKYLDTVKKVMSYRQMNIVKKTEIQKGEFSKATIKPKGNSSKLIPRKTNWDPMKYGGLDSPNMAYAVVIEYAKGKNKLVFEKKIIRVTIMERKAFEKDEKAFLEEQGYRQPKVLAKLPKYTLYECEEGRRRMLASANEAQKGNQQVLPNHLVTLLHHAANCEVSDGKSLDYIESNREMFAELLAHVSEFAKRYTLAEANLNKINQLFEQNKEGDIKAIAQSFVDLMAFNAMGAPASFKFFETTIERKRYNNLKELLNSTIIYQSITGLYESRKRLDD

SEQ ID NO: 5 - RNA, 96 nt, Artificial Sequence
  Synthetic oligonucleotide
  misc_feature (1)..(20): a, c, u, g, unknown or other
nnnnnnnnnnnnnnnnnnnnguuuuagagcuagaaauagcaaguuaaaauaaggcuaguccguuaucaacuugaaaaaguggcaccgagucggugc

SEQ ID NO: 6 - protein, 1082 aa, Neisseria meningitidis
MAAFKPNSINYILGLDIGIASVGWAMVEIDEEENPIRLIDLGVRVFERAEVPKTGDSLAMARRLARSVRRLTRRRAHRLLRTRRLLKREGVLQAANFDENGLIKSLPNTPWQLRAAALDRKLTPLEWSAVLLHLIKHRGYLSQRKNEGETADKELGALLKGVAGNAHALQTGDFRTPAELALNKFEKESGHIRNQRSDYSHTFSRKDLQAELILLFEKQKEFGNPHVSGGLKEGIETLLMTQRPALSGDAVQKMLGHCTFEPAEPKAAKNTYTAERFIWLTKLNNLRILEQGSERPLTDTERATLMDEPYRKSKLTYAQARKLLGLEDTAFFKGLRYGKDNAEASTLMEMKAYHAISRALEKEGLKDKKSPLNLSPELQDEIGTAFSLFKTDEDITGRLKDRIQPEILEALLKHISFDKFVQISLKALRRIVPLMEQGKRYDEACAEIYGDHYGKKNTEEKIYLPPIPADEIRNPVVLRALSQARKVINGVVRRYGSPARIHIETAREVGKSFKDRKEIEKRQEENRKDREKAAAKFREYFPNFVGEPKSKDILKLRLYEQQHGKCLYSGKEINLGRLNEKGYVEIDHALPFSRTWDDSFNNKVLVLGSENQNKGNQTPYEYFNGKDNSREWQEFKARVETSRFPRSKKQRILLQKFDEDGFKERNLNDTRYVNRFLCQFVADRMRLTGKGKKRVFASNGQITNLLRGFWGLRKVRAENDRHHALDAVVVACSTVAMQQKITRFVRYKEMNAFDGKTIDKETGEVLHQKTHFPQPWEFFAQEVMIRVFGKPDGKPEFEEADTLEKLRTLLAEKLSSRPEAVHEYVTPLFVSRAPNRKMSGQGHMETVKSAKRLDEGVSVLRVPLTQLKLKDLEKMVNREREPKLYEALKARLEAHKDDPAKAFAEPFYKYDKAGNRTQQVKAVRVEQVQKTGVWVRNHNGIADNATMVRVDVFEKGDKYYLVPIYSWQVAKGILPDRAVVQGKDEEDWQLIDDSFNFKFSLHPNDLVEVITKKARMFGYFASCHRGTGNINIRIHDLDHKIGKNGILEGIGVKTALSFQKYQIDELGKEIRPCRLKKRPPVR

SEQ ID NO: 7 - protein, 1368 aa, Streptococcus pyogenes [sequence omitted]

SEQ ID NO: 8 - protein, 12 aa, Artificial Sequence
  Synthetic peptide
  VARIANT (2)..(2): Xaa is Ile or Val or Met or Leu or Thr
  VARIANT (4)..(4): Xaa is Thr or Ile or Val or Ser or Asn or Tyr or Glu or Leu
  VARIANT (5)..(5): Xaa is Asn or Ser or Gly or Ala or Asp or Thr or Arg or Met or Phe
  VARIANT (6)..(6): Xaa is Ser or Tyr or Asn or Phe
  VARIANT (7)..(7): Xaa is Val or Ile or Leu or Cys or Thr or Phe
  VARIANT (9)..(9): Xaa is Trp or Phe or Val or Tyr or Ser or Leu
  VARIANT (10)..(10): Xaa is Ala or Ser or Cys or Val or Gly
  VARIANT (11)..(11): Xaa is Val or Ile or Leu or Ala or Met or His
  VARIANT (12)..(12): Any amino acid or absent
DXGXXXXGXXXX

SEQ ID NO: 9 - protein, 12 aa, Artificial Sequence
  Synthetic peptide
  VARIANT (2)..(2): Xaa is Ile or Val or Met or Leu or Thr
  VARIANT (4)..(4): Xaa is Thr or Ile or Val or Ser or Asn or Tyr or Glu or Leu
  VARIANT (5)..(5): Xaa is Asn or Ser or Gly or Ala or Asp or Thr or Arg or Met or Phe
  VARIANT (7)..(7): Xaa is Val or Ile or Leu or Cys or Thr or Phe
  VARIANT (9)..(9): Xaa is Trp or Phe or Val or Tyr or Ser or Leu
  VARIANT (10)..(10): Xaa is Ala or Ser or Cys or Val or Gly
  VARIANT (11)..(11): Xaa is Val or Ile or Leu or Ala or Met or His
  VARIANT (12)..(12): Any amino acid or absent
DXGXXSXGXXXX

SEQ ID NO: 10 - protein, 12 aa, Artificial Sequence
  Synthetic peptide
  VARIANT (4)..(4): Xaa is Thr or Ile or Val or Ser or Asn or Tyr or Glu or Leu
  VARIANT (5)..(5): Xaa is Asn or Ser or Gly or Ala or Asp or Thr or Arg or Met or Phe
  VARIANT (11)..(11): Xaa is Val or Ile or Leu or Ala or Met or His
  VARIANT (12)..(12): Any amino acid or absent
DIGXXSVGWAXX

SEQ ID NO: 11 - protein, 12 aa, Artificial Sequence
  Synthetic peptide
  MOD_RES (12)..(12): Any non-polar alkyl amino acid or a hydroxyl amino acid
DIGTNSVGWAVX

SEQ ID NO: 12 - protein, 8 aa, Artificial Sequence
  Synthetic peptide
  VARIANT (2)..(2): Xaa is Val or His
  VARIANT (3)..(3): Xaa is Ile or Leu or Val
  VARIANT (5)..(5): Xaa is Met or Thr
IXXEXARE

SEQ ID NO: 13 - protein, 8 aa, Artificial Sequence
  Synthetic peptide
  VARIANT (3)..(3): Xaa is Ile or Leu or Val
IVXEMARE

SEQ ID NO: 14 - protein, 8 aa, Artificial Sequence
  Synthetic peptide
  VARIANT (4)..(4): Xaa is His or Leu
  VARIANT (7)..(7): Xaa is Arg or Val
  VARIANT (8)..(8): Xaa is Glu or Val
HHAXDAXX

SEQ ID NO: 15 - protein, 8 aa, Artificial Sequence
  Synthetic peptide
HHAHDAYL

SEQ ID NO: 16 - protein, 30 aa, Artificial Sequence
  Synthetic polypeptide
  VARIANT (2)..(2): Xaa is Lys or Pro
  VARIANT (4)..(4): Xaa is Val or Leu or Ile or Phe
  VARIANT (5)..(5): Xaa is Gly or Ala or Ser
  VARIANT (6)..(6): Xaa is Leu or Ile or Val or Phe
  MOD_RES (7)..(26): Any amino acid and this region may encompass 5-20 residues wherein some positions may be absent
  VARIANT (29)..(29): Xaa is Asp or Glu or Asn or Gln
KXYXXXXXXXXXXXXXXXXXXXXXXXTDXY

SEQ ID NO: 17 - protein, 27 aa, Artificial Sequence
  Synthetic peptide
  VARIANT (1)..(1): Xaa is Asp or Glu or Gln or Asn
  VARIANT (2)..(2): Xaa is Leu or Ile or Arg or Gln or Val or Met or Lys
  VARIANT (3)..(3): Xaa is Asp or Glu
  VARIANT (5)..(5): Xaa is Ile or Val or Thr or Ala or Leu
  VARIANT (6)..(6): Xaa is Val or Tyr or Ile or Leu or Phe or Trp
  VARIANT (8)..(8): Xaa is Gln or His or Arg or Lys or Tyr or Ile or Leu or Phe or Trp
  VARIANT (9)..(9): Xaa is Ser or Ala or Asp or Thr or Lys
  VARIANT (10)..(10): Xaa is Phe or Leu or Val or Lys or Tyr or Met or Ile or Arg or Ala or Glu or Asp or Gln
  VARIANT (11)..(11): Xaa is Leu or Arg or Thr or Ile or Val or Ser or Cys or Tyr or Lys or Phe or Gly
  VARIANT (12)..(12): Xaa is Lys or Gln or Tyr or Thr or Phe or Leu or Trp or Met or Ala or Glu or Gly or Ser
  VARIANT (13)..(13): Xaa is Asp or Ser or Asn or Arg or Leu or Thr
  VARIANT (14)..(14): Xaa is Asp or Asn or Ser
  VARIANT (15)..(15): Xaa is Ser or Ala or Thr or Gly or Arg
  VARIANT (16)..(16): Xaa is Ile or Leu or Phe or Ser or Arg or Tyr or Gln or Trp or Asp or Lys or His
  VARIANT (17)..(17): Xaa is Asp or Ser or Ile or Asn or Glu or Ala or His or Phe or Leu or Gln or Met or Gly or Tyr or Val
  VARIANT (19)..(19): Xaa is Lys or Leu or Arg or Met or Thr or Phe
  VARIANT (20)..(20): Xaa is Val or Leu or Ile or Ala or Thr
  VARIANT (21)..(21): Xaa is Leu or Ile or Val or Ala
  VARIANT (22)..(22): Xaa is Thr or Val or Cys or Glu or Ser or Ala
  VARIANT (23)..(23): Xaa is Arg or Phe or Thr or Trp or Glu or Leu or Asn or Cys or Lys or Val or Ser or Gln or Ile or Tyr or His or Ala
  VARIANT (24)..(24): Xaa is Ser or Pro or Arg or Lys or Asn or Ala or His or Gln or Gly or Leu
  VARIANT (25)..(25): Xaa is Asp or Gly or Thr or Asn or Ser or Lys or Ala or Ile or Glu or Leu or Gln or Arg or Tyr
  VARIANT (26)..(26): Xaa is Lys or Val or Ala or Glu or Tyr or Ile or Cys or Leu or Ser or Thr or Gly or Lys or Met or Asp or Phe
XXXHXXPXXXXXXXXXXNXXXXXXXXN

SEQ ID NO: 18 - protein, 27 aa, Artificial Sequence
  Synthetic peptide
  VARIANT (1)..(1): Xaa is Asp or Glu
  VARIANT (2)..(2): Xaa is Leu or Ile or Arg or Gln or Val or Met or Lys
  VARIANT (3)..(3): Xaa is Asp or Glu
  VARIANT (5)..(5): Xaa is Ile or Val or Thr or Ala or Leu
  VARIANT (6)..(6): Xaa is Val or Tyr or Ile or Leu or Phe or Trp
  VARIANT (8)..(8): Xaa is Gln or His or Arg or Lys or Tyr or Ile or Leu or Phe or Trp
  VARIANT (10)..(10): Xaa is Phe or Leu or Val or Lys or Tyr or Met or Ile or Arg or Ala or Glu or Asp or Gln
  VARIANT (11)..(11): Xaa is Leu or Arg or Thr or Ile or Val or Ser or Cys or Tyr or Lys or Phe or Gly
  VARIANT (12)..(12): Xaa is Lys or Gln or Tyr or Thr or Phe or Leu or Trp or Met or Ala or Glu or Gly or Ser
  VARIANT (16)..(16): Xaa is Ile or Leu or Phe or Ser or Arg or Tyr or Gln or Trp or Asp or Lys or His
  VARIANT (17)..(17): Xaa is Asp or Ser or Ile or Asn or Glu or Ala or His or Phe or Leu or Gln or Met or Gly or Tyr or Val
  VARIANT (22)..(22): Xaa is Thr or Val or Cys or Glu or Ser or Ala
  VARIANT (23)..(23): Xaa is Arg or Phe or Thr or Trp or Glu or Leu or Asn or Cys or Lys or Val or Ser or Gln or Ile or Tyr or His or Ala
  VARIANT (24)..(24): Xaa is Ser or Pro or Arg or Lys or Asn or Ala or His or Gln or Gly or Leu
  VARIANT (25)..(25): Xaa is Asp or Gly or Thr or Asn or Ser or Lys or Ala or Ile or Glu or Leu or Gln or Arg or Tyr
  VARIANT (26)..(26): Xaa is Lys or Val or Ala or Glu or Tyr or Ile or Cys or Leu or Ser or Thr or Gly or Lys Met or Asp or Phe
XXXHXXPXSXXXDDSXXNKVLXXXXXN

SEQ ID NO: 19 - protein, 27 aa, Artificial Sequence
  Synthetic peptide
  VARIANT (1)..(1): Xaa is Asp or Glu
  VARIANT (3)..(3): Xaa is Asp or Glu
  VARIANT (8)..(8): Xaa is Gln or His or Arg or Lys or Tyr or Ile or Leu or Trp
  VARIANT (10)..(10): Xaa is Phe or Leu or Val or Lys or Tyr or Met or Ile or Arg or Ala or Glu or Asp or Gln
  VARIANT (11)..(11): Xaa is Leu or Arg or Thr or Ile or Val or Ser or Cys or Tyr or Lys or Phe or Gly
  VARIANT (12)..(12): Xaa is Lys or Gln or Tyr or Thr or Phe or Leu or Trp or Met or Ala or Glu or Gly or Ser
  VARIANT (16)..(16): Xaa is Ile or Leu or Phe or Ser or Arg or Tyr or Gln or Trp or Asp or Lys or His
  VARIANT (17)..(17): Xaa is Asp or Ser or Ile or Asn or Glu or Ala or His or Phe or Leu or Gln or Met or Gly or Tyr or Val
  VARIANT (23)..(23): Xaa is Arg or Phe or Thr or Trp or Glu or Leu or Asn or Cys or Lys or Val or Ser or Gln or Ile or Tyr or His or Ala
  VARIANT (24)..(24): Xaa is Ser or Pro or Arg or Lys or Asn or Ala or His or Gln or Gly or Leu
  VARIANT (25)..(25): Xaa is Asp or Gly or Thr or Asn or Ser or Lys or Ala or Ile or Glu or Leu or Gln or Arg or Tyr
  VARIANT (26)..(26): Xaa is Lys or Val or Ala or Glu or Tyr or Ile or Cys or Leu or Ser or Thr or Gly or Lys or Met or Asp or Phe
XVXHIVPXSXXXDDSXXNKVLTXXXXN

SEQ ID NO: 20 - protein, 27 aa, Artificial Sequence
  Synthetic peptide
  VARIANT (2)..(2): Xaa is Ile or Val
  VARIANT (6)..(6): Xaa is Ile or Val
  VARIANT (9)..(9): Xaa is Ala or Ser
  VARIANT (11)..(11): Xaa is Ile or Leu
  VARIANT (12)..(12): Xaa is Lys or Thr
  VARIANT (14)..(14): Xaa is Asp or Asn
  VARIANT (19)..(19): Xaa is Arg or Lys or Leu
  VARIANT (22)..(22): Xaa is Thr or Val
  VARIANT (23)..(23): Xaa is Ser or Arg
  VARIANT (25)..(25): Xaa is Lys or Asp or Ala
  VARIANT (26)..(26): Xaa is Glu or Lys or Gly or Asn
DXDHIXPQXFXXDXSIDNXVLXXSXXN

SEQ ID NO: 21 - protein, 73 aa, Artificial Sequence
  Synthetic polypeptide
  VARIANT (8)..(8): Xaa is Lys or Arg
  VARIANT (12)..(12): Xaa is Val or Thr
  VARIANT (13)..(13): Xaa is Gly or Asp
  VARIANT (14)..(14): Xaa is Glu or Gln or Asp
  VARIANT (15)..(15): Xaa is Glu or Asp
  VARIANT (19)..(19): Xaa is Asp or Asn or His
  VARIANT (20)..(20): Xaa is Tyr or Arg or Asn
  VARIANT (23)..(23): Xaa is Gln or Asp or Asn
  MOD_RES (25)..(64): Any amino acid and this region may encompass 15-40 residues wherein some positions may be absent
  VARIANT (67)..(67): Xaa is Gly or Glu
  VARIANT (69)..(69): Xaa is Ser or Gly
  VARIANT (71)..(71): Xaa is Asp or Asn
LYYLQNGXDMYXXXXLDIXXLSXYXXXXXXXXXXXXXXXXXXXXXXXXXXXXXXXXXXXXXXXXNRXKXDXVP

SEQ ID NO: 22 - DNA, 4107 bp, Artificial Sequence
  Synthetic polynucleotide
atggataaaaagtacagcatcgggctggacatcggtacaaactcagtggggtgggccgtgattacggacgagtacaaggtaccctccaaaaaatttaaagtgctgggtaacacggacagacactctataaagaaaaatcttattggagccttgctgttcgactcaggcgagacagccgaagccacaaggttgaagcggaccgccaggaggcggtataccaggagaaagaaccgcatatgctacctgcaagaaatcttcagtaacgagatggcaaaggttgacgatagctttttccatcgcctggaagaatcctttcttgttgaggaagacaagaagcacgaacggcaccccatctttggcaatattgtcgacgaagtggcatatcacgaaaagtacccgactatctaccacctcaggaagaagctggtggactctaccgataaggcggacctcagacttatttatttggcactcgcccacatgattaaatttagaggacatttcttgatcgagggcgacctgaacccggacaacagtgacgtcgataagctgttcatccaacttgtgcagacctacaatcaactgttcgaagaaaaccctataaatgcttcaggagtcgacgctaaagcaatcctgtccgcgcgcctctcaaaatctagaagacttgagaatctgattgctcagttgcccggggaaaagaaaaatggattgtttggcaacctgatcgccctcagtctcggactgaccccaaatttcaaaagtaacttcgacctggccgaagacgctaagctccagctgtccaaggacacatacgatgacgacctcgacaatctgctggcccagattggggatcagtacgccgatctctttttggcagcaaagaacctgtccgacgccatcctgttgagcgatatcttgagagtgaacaccgaaattactaaagcaccccttagcgcatctatgatcaagcggtacgacgagcatcatcaggatctgaccctgctgaaggctcttgtgaggcaacagctccccgaaaaatacaaggaaatcttctttgaccagagcaaaaacggctacgctggctatatagatggtggggccagtcaggaggaattctataaattcatcaagcccattctcgagaaaatggacggcacagaggagttgctggtcaaacttaacagggaggacctgctgcggaagcagcggacctttgacaacgggtctatcccccaccagattcatctgggcgaactgcacgcaatcctgaggaggcaggaggatttttatccttttcttaaagataaccgcgagaaaatagaaaagattcttacattcaggatcccgtactacgtgggacctctcgcccggggcaattcacggtttgcctggatgacaaggaagtcagaggagactattacaccttggaacttcgaagaagtggtggacaagggtgcatctgcccagtctttcatcgagcggatgacaaattttgacaagaacctccctaatgagaaggtgctgcccaaacattctctgctctacgagtactttaccgtctacaatgaactgactaaagtcaagtacgtcaccgagggaatgaggaagccggcattccttagtggagaacagaagaaggcgattgtagacctgttgttcaagaccaacaggaaggtgactgtgaagcaacttaaagaagactactttaagaagatcgaatgttttgacagtgtggaaatttcaggggttgaagaccgcttcaatgcgtcattggggacttaccatgatcttctcaagatcataaaggacaaagacttcctggacaacgaagaaaatgaggatattctcgaagacatcgtcctcaccctgaccctgttcgaagacagggaaatgatagaagagcgcttgaaaacctatgcccacctcttcgacgataaagttatgaagcagctgaagcgcaggagatacacaggatggggaagattgtcaaggaagctgatcaatggaattagggataaacagagtggcaagaccatactggatttcctcaaatctgatggcttcgccaataggaacttcatgcaactgattcacgatgactctcttaccttcaaggaggacattcaaaaggctcaggtgagcgggcagggagactcccttcatgaacacatcgcgaatttggcaggttcccccgctattaaaaagggcatccttcaaactgtcaaggtggtggatgaattggtcaaggtaatgggcagacataagccagaaaatattgtgatcgagatggcccgcgaaaaccagaccacacagaagggccagaaaaatagtagagagcggatgaagaggatcgaggagggcatcaaagagctgggatctcagattctcaaagaacaccccgtagaaaacacacagctgcagaacgaaaaattgtacttgtactatctgcagaacggcagagacatgtacgtcgaccaagaacttgatattaatagactgtccgactatgacgtagaccatatcgtgccccagtccttcctgaaggacgactccattgataacaaagtcttgacaagaagcgacaagaacaggggtaaaagtgataatgtgcctagcgaggaggtggtgaaaaaaatgaagaactactggcgacagctgcttaatgcaaagctcattacacaacggaagttcgataatctgacgaaagcagagagaggtggcttgtctgagttggacaaggcagggtttattaagcggcagctggtggaaactaggcagatcacaaagcacgtggcgcagattttggacagccggatgaacacaaaatacgacgaaaatgataaactgatacgagaggtcaaagttatcacgctgaaaagcaagctggtgtccgattttcggaaagacttccagttctacaaagttcgcgagattaataactaccatcatgctcacgatgcgtacctgaacgctgttgtcgggaccgccttgataaagaagtacccaaagctggaatccgagttcgtatacggggattacaaagtgtacgatgtgaggaaaatgatagccaagtccgagcaggagattggaaaggccacagctaagtacttcttttattctaacatcatgaatttttttaagacggaaattaccctggccaacggagagatcagaaagcggccccttatagagacaaatggtgaaacaggtgaaatcgtctgggataagggcagggatttcgctactgtgaggaaggtgctgagtatgccacaggtaaatatcgtgaaaaaaaccgaagtacagaccggaggattttccaaggaaagcattttgcctaaaagaaactcagacaagctcatcgcccgcaagaaagattgggaccctaagaaatacgggggatttgactcacccaccgtagcctattctgtgctggtggtagctaaggtggaaaaaggaaagtctaagaagctgaagtccgtgaaggaactcttgggaatcactatcatggaaagatcatcctttgaaaagaaccctatcgatttcctggaggctaagggttacaaggaggtcaagaaagacctcatcattaaactgccaaaatactctctcttcgagctggaaaatggcaggaagagaatgttggccagcgccggagagctgcaaaagggaaacgagcttgctctgccctccaaatatgttaattttctctatctcgcttcccactatgaaaagctgaaagggtctcccgaagataacgagcagaagcagctgttcgtcgaacagcacaagcactatctggatgaaataatcgaacaaataagcgagttcagcaaaagggttatcctggcggatgctaatttggacaaagtactgtctgcttataacaagcaccgggataagcctattagggaacaagccgagaatataattcacctctttacactcacgaatctcggagcccccgccgccttcaaatactttgatacgactatcgaccggaaacggtataccagtaccaaagaggtcctcgatgccaccctcatccaccagtcaattactggcctgtacgaaacacggatcgacctctctcaactgggcggcgactag

SEQ ID NO: 23 - protein, 1368 aa, Streptococcus pyogenes [sequence omitted]

SEQ ID NO: 24 - DNA, 3249 bp, Artificial Sequence
  Synthetic polynucleotide
atggccgccttcaagcccaaccccatcaactacatcctgggcctggacatcggcatcgccagcgtgggctgggccatggtggagatcgacgaggacgagaaccccatctgcctgatcgacctgggtgtgcgcgtgttcgagcgcgctgaggtgcccaagactggtgacagtctggctatggctcgccggcttgctcgctctgttcggcgccttactcgccggcgcgctcaccgccttctgcgcgctcgccgcctgctgaagcgcgagggtgtgctgcaggctgccgacttcgacgagaacggcctgatcaagagcctgcccaacactccttggcagctgcgcgctgccgctctggaccgcaagctgactcctctggagtggagcgccgtgctgctgcacctgatcaagcaccgcggctacctgagccagcgcaagaacgagggcgagaccgccgacaaggagctgggtgctctgctgaagggcgtggccgacaacgcccacgccctgcagactggtgacttccgcactcctgctgagctggccctgaacaagttcgagaaggagagcggccacatccgcaaccagcgcggcgactacagccacaccttcagccgcaaggacctgcaggccgagctgatcctgctgttcgagaagcagaaggagttcggcaacccccacgtgagcggcggcctgaaggagggcatcgagaccctgctgatgacccagcgccccgccctgagcggcgacgccgtgcagaagatgctgggccactgcaccttcgagccagccgagcccaaggccgccaagaacacctacaccgccgagcgcttcatctggctgaccaagctgaacaacctgcgcatcctggagcagggcagcgagcgccccctgaccgacaccgagcgcgccaccctgatggacgagccctaccgcaagagcaagctgacctacgcccaggcccgcaagctgctgggtctggaggacaccgccttcttcaagggcctgcgctacggcaaggacaacgccgaggccagcaccctgatggagatgaaggcctaccacgccatcagccgcgccctggagaaggagggcctgaaggacaagaagagtcctctgaacctgagccccgagctgcaggacgagatcggcaccgccttcagcctgttcaagaccgacgaggacatcaccggccgcctgaaggaccgcatccagcccgagatcctggaggccctgctgaagcacatcagcttcgacaagttcgtgcagatcagcctgaaggccctgcgccgcatcgtgcccctgatggagcagggcaagcgctacgacgaggcctgcgccgagatctacggcgaccactacggcaagaagaacaccgaggagaagatctacctgcctcctatccccgccgacgagatccgcaaccccgtggtgctgcgcgccctgagccaggcccgcaaggtgatcaacggcgtggtgcgccgctacggcagccccgcccgcatccacatcgagaccgcccgcgaggtgggcaagagcttcaaggaccgcaaggagatcgagaagcgccaggaggagaaccgcaaggaccgcgagaaggccgccgccaagttccgcgagtacttccccaacttcgtgggcgagcccaagagcaaggacatcctgaagctgcgcctgtacgagcagcagcacggcaagtgcctgtacagcggcaaggagatcaacctgggccgcctgaacgagaagggctacgtggagatcgaccacgccctgcccttcagccgcacctgggacgacagcttcaacaacaaggtgctggtgctgggcagcgagaaccagaacaagggcaaccagaccccctacgagtacttcaacggcaaggacaacagccgcgagtggcaggagttcaaggcccgcgtggagaccagccgcttcccccgcagcaagaagcagcgcatcctgctgcagaagttcgacgaggacggcttcaaggagcgcaacctgaacgacacccgctacgtgaaccgcttcctgtgccagttcgtggccgaccgcatgcgcctgaccggcaagggcaagaagcgcgtgttcgccagcaacggccagatcaccaacctgctgcgcggcttctggggcctgcgcaaggtgcgcgccgagaacgaccgccaccacgccctggacgccgtggtggtggcctgcagcaccgtggccatgcagcagaagatcacccgcttcgtgcgctacaaggagatgaacgccttcgacggtaaaaccatcgacaaggagaccggcgaggtgctgcaccagaagacccacttcccccagccctgggagttcttcgcccaggaggtgatgatccgcgtgttcggcaagcccgacggcaagcccgagttcgaggaggccgacacccccgagaagctgcgcaccctgctggccgagaagctgagcagccgccctgaggccgtgcacgagtacgtgactcctctgttcgtgagccgcgcccccaaccgcaagatgagcggtcagggtcacatggagaccgtgaagagcgccaagcgcctggacgagggcgtgagcgtgctgcgcgtgcccctgacccagctgaagctgaaggacctggagaagatggtgaaccgcgagcgcgagcccaagctgtacgaggccctgaaggcccgcctggaggcccacaaggacgaccccgccaaggccttcgccgagcccttctacaagtacgacaaggccggcaaccgcacccagcaggtgaaggccgtgcgcgtggagcaggtgcagaagaccggcgtgtgggtgcgcaaccacaacggcatcgccgacaacgccaccatggtgcgcgtggacgtgttcgagaagggcgacaagtactacctggtgcccatctacagctggcaggtggccaagggcatcctgcccgaccgcgccgtggtgcagggcaaggacgaggaggactggcagctgatcgacgacagcttcaacttcaagttcagcctgcaccccaacgacctggtggaggtgatcaccaagaaggcccgcatgttcggctacttcgccagctgccaccgcggcaccggcaacatcaacatccgcatccacgacctggaccacaagatcggcaagaacggcatcctggagggcatcggcgtgaagaccgccctgagcttccagaagtaccagatcgacgagctgggcaaggagatccgcccctgccgcctgaagaagcgccctcctgtgcgctaa

SEQ ID NO: 25 - protein, 1082 aa, Neisseria meningitidis
MAAFKPNPINYILGLDIGIASVGWAMVEIDEDENPICLIDLGVRVFERAEVPKTGDSLAMARRLARSVRRLTRRRAHRLLRARRLLKREGVLQAADFDENGLIKSLPNTPWQLRAAALDRKLTPLEWSAVLLHLIKHRGYLSQRKNEGETADKELGALLKGVADNAHALQTGDFRTPAELALNKFEKESGHIRNQRGDYSHTFSRKDLQAELILLFEKQKEFGNPHVSGGLKEGIETLLMTQRPALSGDAVQKMLGHCTFEPAEPKAAKNTYTAERFIWLTKLNNLRILEQGSERPLTDTERATLMDEPYRKSKLTYAQARKLLGLEDTAFFKGLRYGKDNAEASTLMEMKAYHAISRALEKEGLKDKKSPLNLSPELQDEIGTAFSLFKTDEDITGRLKDRIQPEILEALLKHISFDKFVQISLKALRRIVPLMEQGKRYDEACAEIYGDHYGKKNTEEKIYLPPIPADEIRNPVVLRALSQARKVINGVVRRYGSPARIHIETAREVGKSFKDRKEIEKRQEENRKDREKAAAKFREYFPNFVGEPKSKDILKLRLYEQQHGKCLYSGKEINLGRLNEKGYVEIDHALPFSRTWDDSFNNKVLVLGSENQNKGNQTPYEYFNGKDNSREWQEFKARVETSRFPRSKKQRILLQKFDEDGFKERNLNDTRYVNRFLCQFVADRMRLTGKGKKRVFASNGQITNLLRGFWGLRKVRAENDRHHALDAVVVACSTVAMQQKITRFVRYKEMNAFDGKTIDKETGEVLHQKTHFPQPWEFFAQEVMIRVFGKPDGKPEFEEADTPEKLRTLLAEKLSSRPEAVHEYVTPLFVSRAPNRKMSGQGHMETVKSAKRLDEGVSVLRVPLTQLKLKDLEKMVNREREPKLYEALKARLEAHKDDPAKAFAEPFYKYDKAGNRTQQVKAVRVEQVQKTGVWVRNHNGIADNATMVRVDVFEKGDKYYLVPIYSWQVAKGILPDRAVVQGKDEEDWQLIDDSFNFKFSLHPNDLVEVITKKARMFGYFASCHRGTGNINIRIHDLDHKIGKNGILEGIGVKTALSFQKYQIDELGKEIRPCRLKKRPPVR

SEQ ID NO: 26 - protein, 1053 aa, Staphylococcus aureus
MKRNYILGLDIGITSVGYGIIDYETRDVIDAGVRLFKEANVENNEGRRSKRGARRLKRRRRHRIQRVKKLLFDYNLLTDHSELSGINPYEARVKGLSQKLSEEEFSAALLHLAKRRGVHNVNEVEEDTGNELSTKEQISRNSKALEEKYVAELQLERLKKDGEVRGSINRFKTSDYVKEAKQLLKVQKAYHQLDQSFIDTYIDLLETRRTYYEGPGEGSPFGWKDIKEWYEMLMGHCTYFPEELRSVKYAYNADLYNALNDLNNLVITRDENEKLEYYEKFQIIENVFKQKKKPTLKQIAKEILVNEEDIKGYRVTSTGKPEFTNLKVYHDIKDITARKEIIENAELLDQIAKILTIYQSSEDIQEELTNLNSELTQEEIEQISNLKGYTGTHNLSLKAINLILDELWHTNDNQIAIFNRLKLVPKKVDLSQQKEIPTTLVDDFILSPVVKRSFIQSIKVINAIIKKYGLPNDIIIELAREKNSKDAQKMINEMQKRNRQTNERIEEIIRTTGKENAKYLIEKIKLHDMQEGKCLYSLEAIPLEDLLNNPFNYEVDHIIPRSVSFDNSFNNKVLVKQEENSKKGNRTPFQYLSSSDSKISYETFKKHILNLAKGKGRISKTKKEYLLEERDINRFSVQKDFINRNLVDTRYATRGLMNLLRSYFRVNNLDVKVKSINGGFTSFLRRKWKFKKERNKGYKHHAEDALIIANADFIFKEWKKLDKAKKVMENQMFEEKQAESMPEIETEQEYKEIFITPHQIKHIKDFKDYKYSHRVDKKPNRELINDTLYSTRKDDKGNTLIVNNLNGLYDKDNDKLKKLINKSPEKLLMYHHDPQTYQKLKLIMEQYGDEKNPLYKYYEETGNYLTKYSKKDNGPVIKKIKYYGNKLNAHLDITDDYPNSRNKVVKLSLKPYRFDVYLDNGVYKFVTVKNLDVIKKENYYEVNSKCYEEAKKLKKISNQAEFIASFYNNDLIKINGELYRVIGVNNDLLNRIEVNMIDITYREYLENMNDKRPPRIIKTIASKTQSIKKYSTDILGNLYEVKSKKHPQIIKKG

SEQ ID NO: 27 - RNA, 104 nt, Artificial Sequence
  Synthetic polynucleotide
  misc_feature (1)..(20): a, c, u, g, unknown or other
nnnnnnnnnnnnnnnnnnnnguuuuagagcuaugcugaaaagcauagcaaguuaaaauaaggcuaguccguuaucaacuugaaaaaguggcaccgagucggugc

SEQ ID NO: 28 - RNA, 106 nt, Artificial Sequence
  Synthetic polynucleotide
  misc_feature (1)..(20): a, c, u, g, unknown or other
nnnnnnnnnnnnnnnnnnnnguuuuagagcuaugcuggaaacagcauagcaaguuaaaauaaggcuaguccguuaucaacuugaaaaaguggcaccgagucggugc

SEQ ID NO: 29 - RNA, 116 nt, Artificial Sequence
  Synthetic polynucleotide
  misc_feature (1)..(20): a, c, u, g, unknown or other
nnnnnnnnnnnnnnnnnnnnguuuuagagcuaugcuguuuuggaaacaaaacagcauagcaaguuaaaauaaggcuaguccguuaucaacuugaaaaaguggcaccgagucggugc

SEQ ID NO: 30 - RNA, 96 nt, Artificial Sequence
  Synthetic oligonucleotide
  misc_feature (1)..(20): a, c, u, g, unknown or other
nnnnnnnnnnnnnnnnnnnnguauuagagcuagaaauagcaaguuaauauaaggcuaguccguuaucaacuugaaaaaguggcaccgagucggugc

SEQ ID NO: 31 - RNA, 96 nt, Artificial Sequence
  Synthetic oligonucleotide
  misc_feature (1)..(20): a, c, u, g, unknown or other
nnnnnnnnnnnnnnnnnnnnguuuaagagcuagaaauagcaaguuuaaauaaggcuaguccguuaucaacuugaaaaaguggcaccgagucggugc

SEQ ID NO: 32 - RNA, 116 nt, Artificial Sequence
  Synthetic polynucleotide
  misc_feature (1)..(20): a, c, u, g, unknown or other
nnnnnnnnnnnnnnnnnnnnguauuagagcuaugcuguauuggaaacaauacagcauagcaaguuaauauaaggcuaguccguuaucaacuugaaaaaguggcaccgagucggugc

SEQ ID NO: 33 - RNA, 47 nt, Artificial Sequence
  Synthetic oligonucleotide
aaggcuaguccguuaucaacuugaaaaaguggcaccgagucggugcu

SEQ ID NO: 34 - RNA, 49 nt, Artificial Sequence
  Synthetic oligonucleotide
aaggcuaguccguuaucaacuugaaaaaguggcaccgagucgguggugc

SEQ ID NO: 35 - RNA, 51 nt, Artificial Sequence
  Synthetic oligonucleotide
aaggcuaguccguuaucaacuugaaaaaguggcaccgagucggugcggauc

SEQ ID NO: 36 - RNA, 31 nt, Artificial Sequence
  Synthetic oligonucleotide
aaggcuaguccguuaucaacuugaaaaagug

SEQ ID NO: 37 - RNA, 18 nt, Artificial Sequence
  Synthetic oligonucleotide
aaggcuaguccguuauca

SEQ ID NO: 38 - RNA, 12 nt, Artificial Sequence
  Synthetic oligonucleotide
aaggcuaguccg

SEQ ID NO: 39 - DNA, 3159 bp, Artificial Sequence
  Synthetic polynucleotide
atgaaaaggaactacattctggggctggacatcgggattacaagcgtggggtatgggattattgactatgaaacaagggacgtgatcgacgcaggcgtcagactgttcaaggaggccaacgtggaaaacaatgagggacggagaagcaagaggggagccaggcgcctgaaacgacggagaaggcacagaatccagagggtgaagaaactgctgttcgattacaacctgctgaccgaccattctgagctgagtggaattaatccttatgaagccagggtgaaaggcctgagtcagaagctgtcagaggaagagttttccgcagctctgctgcacctggctaagcgccgaggagtgcataacgtcaatgaggtggaagaggacaccggcaacgagctgtctacaaaggaacagatctcacgcaatagcaaagctctggaagagaagtatgtcgcagagctgcagctggaacggctgaagaaagatggcgaggtgagagggtcaattaataggttcaagacaagcgactacgtcaaagaagccaagcagctgctgaaagtgcagaaggcttaccaccagctggatcagagcttcatcgatacttatatcgacctgctggagactcggagaacctactatgagggaccaggagaagggagccccttcggatggaaagacatcaaggaatggtacgagatgctgatgggacattgcacctattttccagaagagctgagaagcgtcaagtacgcttataacgcagatctgtacaacgccctgaatgacctgaacaacctggtcatcaccagggatgaaaacgagaaactggaatactatgagaagttccagatcatcgaaaacgtgtttaagcagaagaaaaagcctacactgaaacagattgctaaggagatcctggtcaacgaagaggacatcaagggctaccgggtgacaagcactggaaaaccagagttcaccaatctgaaagtgtatcacgatattaaggacatcacagcacggaaagaaatcattgagaacgccgaactgctggatcagattgctaagatcctgactatctaccagagctccgaggacatccaggaagagctgactaacctgaacagcgagctgacccaggaagagatcgaacagattagtaatctgaaggggtacaccggaacacacaacctgtccctgaaagctatcaatctgattctggatgagctgtggcatacaaacgacaatcagattgcaatctttaaccggctgaagctggtcccaaaaaaggtggacctgagtcagcagaaagagatcccaaccacactggtggacgatttcattctgtcacccgtggtcaagcggagcttcatccagagcatcaaagtgatcaacgccatcatcaagaagtacggcctgcccaatgatatcattatcgagctggctagggagaagaacagcaaggacgcacagaagatgatcaatgagatgcagaaacgaaaccggcagaccaatgaacgcattgaagagattatccgaactaccgggaaagagaacgcaaagtacctgattgaaaaaatcaagctgcacgatatgcaggagggaaagtgtctgtattctctggaggccatccccctggaggacctgctgaacaatccattcaactacgaggtcgatcatattatccccagaagcgtgtccttcgacaattcctttaacaacaaggtgctggtcaagcaggaagagaactctaaaaagggcaataggactcctttccagtacctgtctagttcagattccaagatctcttacgaaacctttaaaaagcacattctgaatctggccaaaggaaagggccgcatcagcaagaccaaaaaggagtacctgctggaagagcgggacatcaacagattctccgtccagaaggattttattaaccggaatctggtggacacaagatacgctactcgcggcctgatgaatctgctgcgatcctatttccgggtgaacaatctggatgtgaaagtcaagtccatcaacggcgggttcacatcttttctgaggcgcaaatggaagtttaaaaaggagcgcaacaaagggtacaagcaccatgccgaagatgctctgattatcgcaaatgccgacttcatctttaaggagtggaaaaagctggacaaagccaagaaagtgatggagaaccagatgttcgaagagaagcaggccgaatctatgcccgaaatcgagacagaacaggagtacaaggagattttcatcactcctcaccagatcaagcatatcaaggatttcaaggactacaagtactctcaccgggtggataaaaagcccaacagagagctgatcaatgacaccctgtatagtacaagaaaagacgataaggggaataccctgattgtgaacaatctgaacggactgtacgacaaagataatgacaagctgaaaaagctgatcaacaaaagtcccgagaagctgctgatgtaccaccatgatcctcagacatatcagaaactgaagctgattatggagcagtacggcgacgagaagaacccactgtataagtactatgaagagactgggaactacctgaccaagtatagcaaaaaggataatggccccgtgatcaagaagatcaagtactatgggaacaagctgaatgcccatctggacatcacagacgattaccctaacagtcgcaacaaggtggtcaagctgtcactgaagccatacagattcgatgtctatctggacaacggcgtgtataaatttgtgactgtcaagaatctggatgtcatcaaaaaggagaactactatgaagtgaatagcaagtgctacgaagaggctaaaaagctgaaaaagattagcaaccaggcagagttcatcgcctccttttacaacaacgacctgattaagatcaatggcgaactgtatagggtcatcggggtgaacaatgatctgctgaaccgcattgaagtgaatatgattgacatcacttaccgagagtatctggaaaacatgaatgataagcgcccccctcgaattatcaaaacaattgcctctaagactcagagtatcaaaaagtactcaaccgacattctgggaaacctgtatgaggtgaagagcaaaaagcaccctcagattatcaaaaagggc

SEQ ID NO: 40 - RNA, 102 nt, Artificial Sequence
  Synthetic oligonucleotide
  misc_feature (1)..(20): n is a, c, g, or u
nnnnnnnnnnnnnnnnnnnnguuuuaguacucuggaaacagaaucuacuaaaacaaggcaaaaugccguguuuaucucgucaacuuguuggcgagauuuuuu

SEQ ID NO: 41 - skipped

SEQ ID NO: 42 - RNA, 42 nt, Streptococcus pyogenes
  misc_feature (1)..(20): a, c, u, g, unknown or other
nnnnnnnnnnnnnnnnnnnnguuuuagagcuaugcuguuuug

SEQ ID NO: 43 - RNA, 85 nt, Streptococcus pyogenes
ggaaccauucaaaacagcauagcaaguuaaaauaaggcuaguccguuaucaacuugaaaaaguggcaccgagucggugcuuuuuu

SEQ ID NO: 44 - RNA, 62 nt, Streptococcus pyogenes
  misc_feature (1)..(20): a, c, u, g, unknown or other
nnnnnnnnnnnnnnnnnnnnguuuuagagcuagaaauagcaaguuaaaauaaggcuaguccg

SEQ ID NO: 45 - RNA, 102 nt, Streptococcus pyogenes
  misc_feature (1)..(20): a, c, u, g, unknown or other
nnnnnnnnnnnnnnnnnnnnguuuuagagcuagaaauagcaaguuaaaauaaggcuaguccguuaucaacuugaaaaaguggcaccgagucggugcuuuuuu

SEQ ID NO: 46 - RNA, 75 nt, Streptococcus pyogenes
  misc_feature (1)..(20): a, c, u, g, unknown or other
nnnnnnnnnnnnnnnnnnnnguuuuagagcuaugcugaaaagcauagcaaguuaaaauaaggcuaguccguuauc

SEQ ID NO: 47 - RNA, 87 nt, Streptococcus pyogenes
  misc_feature (1)..(20): a, c, u, g, unknown or other
nnnnnnnnnnnnnnnnnnnnguuuuagagcuaugcuguuuuggaaacaaaacagcauagcaaguuaaaauaaggcuaguccguuauc

SEQ ID NO: 48 - RNA, 42 nt, Streptococcus thermophilus
  misc_feature (1)..(20): a, c, u, g, unknown or other
nnnnnnnnnnnnnnnnnnnnguuuuagagcuguguuguuucg

SEQ ID NO: 49 - RNA, 78 nt, Streptococcus thermophilus
gggcgaaacaacacagcgaguuaaaauaaggcuuaguccguacucaacuugaaaagguggcaccgauucgguguuuuu

SEQ ID NO: 50 - RNA, 42 nt, Streptococcus pyogenes; identical to SEQ ID NO: 42
  misc_feature (1)..(20): a, c, u, g, unknown or other

SEQ ID NO: 51 - RNA, 42 nt, Streptococcus thermophilus; identical to SEQ ID NO: 48
  misc_feature (1)..(20): a, c, u, g, unknown or other

SEQ ID NO: 52 - RNA, 85 nt, Streptococcus pyogenes
gaaccauucaaaacagcauagcaaguuaaaauaaggcuaguccguuaucaacuugaaaaaguggcaccgagucggugcuuuuuuu

SEQ ID NO: 53 - RNA, 78 nt, Streptococcus thermophilus; identical to SEQ ID NO: 49

SEQ ID NO: 54 - protein, 12 aa, Artificial Sequence
  Synthetic peptide
DIGTNSVGWAVT

SEQ ID NO: 55 - protein, 12 aa, Artificial Sequence
  Synthetic peptide
DIGTNSVGWAVT

SEQ ID NO: 56 - protein, 12 aa, Artificial Sequence
  Synthetic peptide
DVGTNSVGWAVT

SEQ ID NO: 57 - protein, 12 aa, Artificial Sequence
  Synthetic peptide
DVGTNSVGWAVT

SEQ ID NO: 58 - protein, 12 aa, Artificial Sequence
  Synthetic peptide
DMGTNSVGWAVT

SEQ ID NO: 59 - protein, 12 aa, Artificial Sequence
  Synthetic peptide
DVGTSSVGWAVT

SEQ ID NO: 60 - protein, 12 aa, Artificial Sequence
  Synthetic peptide
DIGTASVGWAVT

SEQ ID NO: 61 - protein, 12 aa, Artificial Sequence
  Synthetic peptide
DVGTGSVGWAVT

SEQ ID NO: 62 - protein, 12 aa, Artificial Sequence
  Synthetic peptide
DIGTNSVGWAVV

SEQ ID NO: 63 - protein, 12 aa, Artificial Sequence
  Synthetic peptide
DIGTNSVGWAVI

SEQ ID NO: 64 - protein, 12 aa, Artificial Sequence
  Synthetic peptide
DIGTNSVGWAVL

SEQ ID NO: 65 - protein, 12 aa, Artificial Sequence
  Synthetic peptide
DLGTNSIGWAVV

SEQ ID NO: 66 - protein, 11 aa, Artificial Sequence
  Synthetic peptide
DLGTNSIGWAI

SEQ ID NO: 67 - protein, 12 aa, Artificial Sequence
  Synthetic peptide
DLGTNSIGWALV

SEQ ID NO: 68 - protein, 12 aa, Artificial Sequence
  Synthetic peptide
DIGTNSVGWCVT

SEQ ID NO: 69 - protein, 12 aa, Artificial Sequence
  Synthetic peptide
DIGTNSVGYAVT

SEQ ID NO: 70 - protein, 12 aa, Artificial Sequence
  Synthetic peptide
DMGTGSLGWAVT

SEQ ID NO: 71 - protein, 12 aa, Artificial Sequence
  Synthetic peptide
DIGTSSVGWAAI

SEQ ID NO: 72 - protein, 12 aa, Artificial Sequence
  Synthetic peptide
DLGTGSVGWAVV

SEQ ID NO: 73 - protein, 12 aa, Artificial Sequence
  Synthetic peptide
DLGVGSVGWAIV

SEQ ID NO: 74 - protein, 12 aa, Artificial Sequence
  Synthetic peptide
DLGIASIGWAII

SEQ ID NO: 75 - protein, 12 aa, Artificial Sequence
  Synthetic peptide
DLGIASVGWAIV

SEQ ID NO: 76 - protein, 12 aa, Artificial Sequence
  Synthetic peptide
DLGVASVGWSIV

SEQ ID NO: 77 - protein, 12 aa, Artificial Sequence
  Synthetic peptide
DIGIASVGWAIL

SEQ ID NO: 78 - protein, 12 aa, Artificial Sequence
  Synthetic peptide
DLGISSVGWSVI

SEQ ID NO: 79 - protein, 12 aa, Artificial Sequence
  Synthetic peptide
DIGIASVGWSVI

SEQ ID NO: 80 - protein, 12 aa, Artificial Sequence
  Synthetic peptide
DVGIGSIGWAVI

SEQ ID NO: 81 - protein, 12 aa, Artificial Sequence
  Synthetic peptide
DLGVGSIGFAIV

SEQ ID NO: 82 - protein, 12 aa, Artificial Sequence
  Synthetic peptide
DIGYASIGWAVI

SEQ ID NO: 83 - protein, 12 aa, Artificial Sequence
  Synthetic peptide
DTGTNSLGWAIV

SEQ ID NO: 84 - protein, 12 aa, Artificial Sequence
  Synthetic peptide
DLGTNSIGWCLL

SEQ ID NO: 85 - protein, 12 aa, Artificial Sequence
  Synthetic peptide
DIGTDSLGWAVF

SEQ ID NO: 86 - protein, 12 aa, Artificial Sequence
  Synthetic peptide
DIGSNSIGFAVV

SEQ ID NO: 87 - protein, 12 aa, Artificial Sequence
  Synthetic peptide
DLGVGSIGVAVA

SEQ ID NO: 88 - protein, 12 aa, Artificial Sequence
  Synthetic peptide
DLGIASCGWGVV

SEQ ID NO: 89 - protein, 12 aa, Artificial Sequence
  Synthetic peptide
DLGIASVGWCLT

SEQ ID NO: 90 - protein, 12 aa, Artificial Sequence
  Synthetic peptide
DIGIGSVGVGIL

SEQ ID NO: 91 - protein, 12 aa, Artificial Sequence
  Synthetic peptide
DIGITSVGYGLI

SEQ ID NO: 92 - protein, 12 aa, Artificial Sequence
  Synthetic peptide
DIGITSVGFGII

SEQ ID NO: 93 - protein, 12 aa, Artificial Sequence
  Synthetic peptide
DVGITSTGYAVL

SEQ ID NO: 94 - protein, 12 aa, Artificial Sequence
  Synthetic peptide
DLGITSFGYAIL

SEQ ID NO: 95 - protein, 12 aa, Artificial Sequence
  Synthetic peptide
DIGNASVGWSAF

SEQ ID NO: 96 - protein, 12 aa, Artificial Sequence
  Synthetic peptide
DVGTNSCGWVAM

SEQ ID NO: 97 - protein, 12 aa, Artificial Sequence
  Synthetic peptide
DVGERSIGLAAV

SEQ ID NO: 98 - protein, 12 aa, Artificial Sequence
  Synthetic peptide
DVGLNSVGLAAV

SEQ ID NO: 99 - protein, 12 aa, Artificial Sequence
  Synthetic peptide
DVGLMSVGLAAI

SEQ ID NO: 100 - protein, 12 aa, Artificial Sequence
  Synthetic peptide
DVGTFSVGLAAI

SEQ ID NO: 101 - protein, 12 aa, Artificial Sequence
  Synthetic peptide
DIGTGSVGYACM

SEQ ID NO: 102 - protein, 12 aa, Artificial Sequence
  Synthetic peptide
DLGTTSIGFAHI

SEQ ID NO: 103 - protein, 12 aa, Artificial Sequence
  Synthetic peptide
DLGTNSIGSSVR

SEQ ID NO: 104 - protein, 12 aa, Artificial Sequence
  Synthetic peptide
DIGTNSVGWAVT

SEQ ID NO: 105 - protein, 12 aa, Artificial Sequence
  Synthetic peptide
DIGTNSVGWAVT

SEQ ID NO: 106 - protein, 12 aa, Artificial Sequence
  Synthetic peptide
DVGTNSVGWAVT

SEQ ID NO: 107 - protein, 12 aa, Artificial Sequence
  Synthetic peptide
DVGTNSVGWAVT

SEQ ID NO: 108 - protein, 12 aa, Artificial Sequence
  Synthetic peptide
DMGTNSVGWAVT

SEQ ID NO: 109 - protein, 12 aa, Artificial Sequence
  Synthetic peptide
DVGTSSVGWAVT

SEQ ID NO: 110 - protein, 12 aa, Artificial Sequence
  Synthetic peptide
DIGTASVGWAVT

SEQ ID NO: 111 - protein, 12 aa, Artificial Sequence
  Synthetic peptide
DVGTGSVGWAVT

SEQ ID NO: 112 - protein, 12 aa, Artificial Sequence
  Synthetic peptide
DIGTNSVGWAVV

SEQ ID NO: 113 - protein, 12 aa, Artificial Sequence
  Synthetic peptide
DIGTNSVGWAVI

SEQ ID NO: 114 - protein, 12 aa, Artificial Sequence
  Synthetic peptide
DIGTNSIGWAVI

SEQ ID NO: 115 - protein, 12 aa, Artificial Sequence
  Synthetic peptide
DIGTNSVGWAVL

SEQ ID NO: 116 - protein, 12 aa, Artificial Sequence
  Synthetic peptide
DLGTNSIGWAVV

SEQ ID NO: 117 - protein, 11 aa, Artificial Sequence
  Synthetic peptide
DLGTNSIGWAI

SEQ ID NO: 118 - protein, 12 aa, Artificial Sequence
  Synthetic peptide
DLGTNSIGWALV

SEQ ID NO: 119 - protein, 12 aa, Artificial Sequence
  Synthetic peptide
DIGTNSVGWCVT

SEQ ID NO: 120 - protein, 12 aa, Artificial Sequence
  Synthetic peptide
DIGTNSVGYAVT

SEQ ID NO: 121 - protein, 12 aa, Artificial Sequence
  Synthetic peptide
DMGTGSLGWAVT

SEQ ID NO: 122 - protein, 12 aa, Artificial Sequence
  Synthetic peptide
DIGTSSVGWAAI

SEQ ID NO: 123 - protein, 12 aa, Artificial Sequence
  Synthetic peptide
DLGTGSVGWAVV

SEQ ID NO: 124 - protein, 12 aa, Artificial Sequence
  Synthetic peptide
DLGVGSVGWAIV

SEQ ID NO: 125 - protein, 12 aa, Artificial Sequence
  Synthetic peptide
DLGIASIGWAII

SEQ ID NO: 126 - protein, 12 aa, Artificial Sequence
  Synthetic peptide
DLGIASVGWAIV

SEQ ID NO: 127 - protein, 12 aa, Artificial Sequence
  Synthetic peptide
DLGIASVGWAVV

SEQ ID NO: 128 - protein, 12 aa, Artificial Sequence
  Synthetic peptide
DLGVASVGWSIV

SEQ ID NO: 129 - protein, 12 aa, Artificial Sequence
  Synthetic peptide
DIGIASVGWAIL

SEQ ID NO: 130 - protein, 12 aa, Artificial Sequence
  Synthetic peptide
DIGIASVGWAVL

SEQ ID NO: 131 - protein, 12 aa, Artificial Sequence
  Synthetic peptide
DIGIASIGWAVI

SEQ ID NO: 132 - protein, 12 aa, Artificial Sequence
  Synthetic peptide
DIGIASVGWAII

SEQ ID NO: 133 - protein, 12 aa, Artificial Sequence
  Synthetic peptide
DVGIASVGWAVI

SEQ ID NO: 134 - protein, 11 aa, Artificial Sequence
  Synthetic peptide
DIGIASVGWAL

SEQ ID NO: 135 - protein, 12 aa, Artificial Sequence
  Synthetic peptide
DIGIASVGWAMV

SEQ ID NO: 136 - protein, 12 aa, Artificial Sequence
  Synthetic peptide
DIGIASVGWSVI

SEQ ID NO: 137 - protein, 12 aa, Artificial Sequence
  Synthetic peptide
DLGISSVGWSVI

SEQ ID NO: 138 - protein, 12 aa, Artificial Sequence
  Synthetic peptide
DIGITSVGWAVI

SEQ ID NO: 139 - protein, 12 aa, Artificial Sequence
  Synthetic peptide
DVGIGSIGWAVI

SEQ ID NO: 140 - protein, 12 aa, Artificial Sequence
  Synthetic peptide
DLGISSLGWAIV

SEQ ID NO: 141 - protein, 12 aa, Artificial Sequence
  Synthetic peptide
DLGVGSIGFAIV

SEQ ID NO: 142 - protein, 12 aa, Artificial Sequence
  Synthetic peptide
DIGYASIGWAVI

SEQ ID NO: 143 - protein, 12 aa, Artificial Sequence
  Synthetic peptide
DLGTNSIGWCLL

SEQ ID NO: 144 - protein, 12 aa, Artificial Sequence
  Synthetic peptide
DLGTNSIGWGLL

SEQ ID NO: 145 - protein, 12 aa, Artificial Sequence
  Synthetic peptide
DTGTNSLGWAIV

SEQ ID NO: 146 - protein, 12 aa, Artificial Sequence
  Synthetic peptide
DIGTDSLGWAVF

SEQ ID NO: 147 - protein, 12 aa, Artificial Sequence
  Synthetic peptide
DLGSTSLGWAIF

SEQ ID NO: 148 - protein, 12 aa, Artificial Sequence
  Synthetic peptide
DIGISSIGWAFS

SEQ ID NO: 149 - protein, 12 aa, Artificial Sequence
  Synthetic peptide
DLGIASVGWCLT

SEQ ID NO: 150 - protein, 12 aa, Artificial Sequence
  Synthetic peptide
DLGIASCGWGVV

SEQ ID NO: 151 - protein, 12 aa, Artificial Sequence
  Synthetic peptide
DIGSNSIGFAVV

SEQ ID NO: 152 - protein, 12 aa, Artificial Sequence
  Synthetic peptide
DIGTTSIGFSVI

SEQ ID NO: 153 - protein, 12 aa, Artificial Sequence
  Synthetic peptide
DIGITSVGYGLI

SEQ ID NO: 154 - protein, 12 aa, Artificial Sequence
  Synthetic peptide
DIGITSVGFGII

SEQ ID NO: 155 - protein, 12 aa, Artificial Sequence
  Synthetic peptide
DLGTTSIGFAHI

SEQ ID NO: 156 - protein, 12 aa, Artificial Sequence
  Synthetic peptide
DIGIGSVGVGIL

SEQ ID NO: 157 - protein, 12 aa, Artificial Sequence
  Synthetic peptide
DLGVGSIGVAVA

SEQ ID NO: 158 - protein, 12 aa, Artificial Sequence
  Synthetic peptide
DVGITSTGYAVL

SEQ ID NO: 159 - protein, 12 aa, Artificial Sequence
  Synthetic peptide
DLGITSFGYAIL

SEQ ID NO: 160 - protein, 12 aa, Artificial Sequence
  Synthetic peptide
DIGTSSIGWWLY

SEQ ID NO: 161 - protein, 12 aa, Artificial Sequence
  Synthetic peptide
DLGSNSLGWFVT

SEQ ID NO: 162 - protein, 12 aa, Artificial Sequence
  Synthetic peptide
DLGANSLGWFVV

SEQ ID NO: 163 - protein, 12 aa, Artificial Sequence
  Synthetic peptide
DIGNASVGWSAF

SEQ ID NO: 164 - protein, 12 aa, Artificial Sequence
  Synthetic peptide
DVGTNSCGWVAM

SEQ ID NO: 165 - protein, 12 aa, Artificial Sequence
  Synthetic peptide
DVGERSIGLAAV

SEQ ID NO: 166 - protein, 12 aa, Artificial Sequence
  Synthetic peptide
DVGLNSVGLAAV

SEQ ID NO: 167 - protein, 12 aa, Artificial Sequence
  Synthetic peptide
DVGLMSVGLAAI

SEQ ID NO: 168 - protein, 12 aa, Artificial Sequence
  Synthetic peptide
DVGTFSVGLAAI

SEQ ID NO: 169 - protein, 12 aa, Artificial Sequence
  Synthetic peptide
DIGTGSVGYACM

SEQ ID NO: 170 - protein, 12 aa, Artificial Sequence
  Synthetic peptide
DLGTNSIGSSVR

SEQ ID NO: 171 - protein, 15 aa, Artificial Sequence
  Synthetic peptide
DIGLRIGITSCGWSI

SEQ ID NO: 172 - protein, 12 aa, Artificial Sequence
  Synthetic peptide
DMGAKYTGVFYA

SEQ ID NO: 173 - protein, 12 aa, Artificial Sequence
  Synthetic peptide
DLGGKNTGFFSF

SEQ ID NO: 174 - protein, 12 aa, Artificial Sequence
  Synthetic peptide
DLGVKNTGVFSA

SEQ ID NO: 175 - protein, 12 aa, Artificial Sequence
  Synthetic peptide
DLGAKFTGVALY

SEQ ID NO: 176 - protein, 12 aa, Artificial Sequence
  Synthetic peptide
DLGGKFTGVCLS

SEQ ID NO: 177 - protein, 12 aa, Artificial Sequence
  Synthetic peptide
DLGGTYTGTFIT

SEQ ID NO: 178 - protein, 28 aa, Artificial Sequence
  Synthetic peptide
YDIDHIYPRSLTKDDSFDNLVLCERTAN

SEQ ID NO: 179 - protein, 28 aa, Artificial Sequence
  Synthetic peptide
DIDHIYPRSKVIKDDSFDNLVLVLKNEN

SEQ ID NO: 180 - protein, 27 aa, Artificial Sequence
  Synthetic peptide
DRDHIYPQSKIKDDSIDNLVLVNKTYN

SEQ ID NO: 181 - protein, 27 aa, Artificial Sequence
  Synthetic peptide
DIDHIYPRSKIKDDSITNRVLVEKDIN

SEQ ID NO: 182 - protein, 27 aa, Artificial Sequence
  Synthetic peptide
DIDHIYPQSKIKDDSISNRVLVCSSCN

SEQ ID NO: 183 - protein, 27 aa, Artificial Sequence
  Synthetic peptide
DIDHIYPQSKTMDDSLNNRVLVKKNYN

SEQ ID NO: 184 - protein, 27 aa, Artificial Sequence
  Synthetic peptide
DQDHIYPKSKIYDDSLENRVLVKKNLN

SEQ ID NO: 185 - protein, 27 aa, Artificial Sequence
  Synthetic peptide
QIDHIVPQSLVKDDSFDNRVLVVPSEN

SEQ ID NO: 186 - protein, 27 aa, Artificial Sequence
  Synthetic peptide
DIDHIIPQAFIKDNSIDNRVLTSSKEN

SEQ ID NO: 187 - protein, 27 aa, Artificial Sequence
  Synthetic peptide
DIDHIIPQAFLKDNSIDNKVLVSSASN

SEQ ID NO: 188 - protein, 27 aa, Artificial Sequence
  Synthetic peptide
DIDHIIPQAYTKDNSLDNRVLVSNITN

SEQ ID NO: 189 - protein, 27 aa, Artificial Sequence
  Synthetic peptide
DIDHIVPQSFITDNSIDNLVLTSSAGN

SEQ ID NO: 190 - protein, 27 aa, Artificial Sequence
  Synthetic peptide
DVDHIVPQSFLKDDSIDNKVLTRSDKN

SEQ ID NO: 191 - protein, 27 aa, Artificial Sequence
  Synthetic peptide
NIDHIYPQSMVKDDSLDNKVLVQSEIN

SEQ ID NO: 192 - protein, 27 aa, Artificial Sequence
  Synthetic peptide
DIDHILPQSLIKDDSLDNRVLVNATIN

SEQ ID NO: 193 - protein, 27 aa, Artificial Sequence
  Synthetic peptide
DIDHILPQSFIKDDSLENRVLVKKAVN

SEQ ID NO: 194 - protein, 27 aa, Artificial Sequence
  Synthetic peptide
EVDHIFPRSFIKDDSIDNKVLVIKKMN

SEQ ID NO: 195 - protein, 27 aa, Artificial Sequence
  Synthetic peptide
EVDHIIPRSYIKDDSFENKVLVYREEN

SEQ ID NO: 196 - protein, 27 aa, Artificial Sequence
  Synthetic peptide
DIDHIIPQAVTQNDSIDNRVLVARAEN

SEQ ID NO: 197 - protein, 27 aa, Artificial Sequence
  Synthetic peptide
EIDHIIPYSISFDDSSSNKLLVLAESN

SEQ ID NO: 198 - protein, 27 aa, Artificial Sequence
  Synthetic peptide
EIDHIIPYSLCFDDSSANKVLVHKQSN

SEQ ID NO: 199 - protein, 27 aa, Artificial Sequence
  Synthetic peptide
DIDHIIPYSRSMDDSYSNKVLVLSGEN

SEQ ID NO: 200 - protein, 27 aa, Artificial Sequence
  Synthetic peptide
DIDHIIPYSKSMDDSFNNKVLCLAEEN

SEQ ID NO: 201 - protein, 27 aa, Artificial Sequence
  Synthetic peptide
EIDHIYPYSRSFDDSYMNKVLVFTKQN

SEQ ID NO: 202 - protein, 27 aa, Artificial Sequence
  Synthetic peptide
QIDHIYPYSRSMDDSYMNKVLVLTDEN

SEQ ID NO: 203 - protein, 27 aa, Artificial Sequence
  Synthetic peptide
EIDHIIPFSRSFDDSLSNKILVLGSEN

SEQ ID NO: 204 - protein, 27 aa, Artificial Sequence
  Synthetic peptide
EIDHALPFSRTWDDSFNNKVLVLGSEN

SEQ ID NO: 205 - protein, 27 aa, Artificial Sequence
  Synthetic peptide
EIDHALPFSRTWDDSFNNKVLVLASEN

SEQ ID NO: 206 - protein, 27 aa, Artificial Sequence
  Synthetic peptide
EIDHIIPISISLDDSINNKVLVLSKAN

SEQ ID NO: 207 - protein, 27 aa, Artificial Sequence
  Synthetic peptide
EVDHIIPISISLDDSITNKVLVTHREN

SEQ ID NO: 208 - protein, 27 aa, Artificial Sequence
  Synthetic peptide
QVDHALPYSRSYDDSKNNKVLVLTHEN

SEQ ID NO: 209 - protein, 27 aa, Artificial Sequence
  Synthetic peptide
EVDHILPLSITFDDSLANKVLVYATAN

SEQ ID NO: 210 - protein, 27 aa, Artificial Sequence
  Synthetic peptide
EIDHIIPRSISFDDARSNKVLVYRSEN

SEQ ID NO: 211 - protein, 27 aa, Artificial Sequence
  Synthetic peptide
EVDHIIPRSVSFDNSYHNKVLVKQSEN

SEQ ID NO: 212 - protein, 27 aa, Artificial Sequence
  Synthetic peptide
DIDHILPYSITFDDSFRNKVLVTSQEN

SEQ ID NO: 213 - protein, 27 aa, Artificial Sequence
  Synthetic peptide
EIDHILPRSRSADDSFANKVLCLARAN

SEQ ID NO: 214 - protein, 27 aa, Artificial Sequence
  Synthetic peptide
EIEHLLPFSLTLDDSMANKTVCFRQAN

SEQ ID NO: 215 - protein, 27 aa, Artificial Sequence
  Synthetic peptide
DIDHILPFSVSLDDSAANKVVCLREAN

SEQ ID NO: 216 - protein, 27 aa, Artificial Sequence
  Synthetic peptide
DIDHLIPFSISWDDSAANKVVCMRYAN

SEQ ID NO: 217 - protein, 27 aa, Artificial Sequence
  Synthetic peptide
DIDHILPVAMTLDDSPANKIICMRYAN

SEQ ID NO: 218 - protein, 27 aa, Artificial Sequence
  Synthetic peptide
DVDHILPYSRTLDDSFPNRTLCLREAN

SEQ ID NO: 219 - protein, 27 aa, Artificial Sequence
  Synthetic peptide
EIEHILPFSRTLDDSLNNRTVAMRRAN

SEQ ID NO: 220 - protein, 27 aa, Artificial Sequence
  Synthetic peptide
EVDHIIPYSISWDDSYTNKVLTSAKCN

SEQ ID NO: 221 - protein, 27 aa, Artificial Sequence
  Synthetic peptide
QVDHILPWSRFGDDSYLNKTLCTARSN

SEQ ID NO: 222 - protein, 27 aa, Artificial Sequence
  Synthetic peptide
QVDHILPFSKTLDDSFANKVLAQHDAN

SEQ ID NO: 223 - protein, 27 aa, Artificial Sequence
  Synthetic peptide
QIDHAFPLSRSLDDSQSNKVLCLTSSN

SEQ ID NO: 224 - protein, 27 aa, Artificial Sequence
  Synthetic peptide
DIDHIVPRSISFDDSFSNLVIVNKLDN

SEQ ID NO: 225 - protein, 27 aa, Artificial Sequence
  Synthetic peptide
EIEHIIPYSMSYDNSQANKILTEKAEN

SEQ ID NO: 226 - protein, 27 aa, Artificial Sequence
  Synthetic peptide
EIDHVIPYSKSADDSWFNKLLVKKSTN

SEQ ID NO: 227 - protein, 27 aa, Artificial Sequence
  Synthetic peptide
EMDHILPYSRSLDNGWHNRVLVHGKDN

SEQ ID NO: 228 - protein, 27 aa, Artificial Sequence
  Synthetic peptide
EVDHIVPYSLILDNTINNKALVYAEEN

SEQ ID NO: 229 - protein, 27 aa, Artificial Sequence
  Synthetic peptide
EIEHVIPQSLYFDDSFSNKVICEAEVN

SEQ ID NO: 230 - protein, 27 aa, Artificial Sequence
  Synthetic peptide
DIEHIIPQARLFDDSFSNKTLEARSVN

SEQ ID NO: 231 - protein, 27 aa, Artificial Sequence
  Synthetic peptide
EIEHIVPKARVFDDSFSNKTLTFHRIN

SEQ ID NO: 232 - protein, 28 aa, Artificial Sequence
  Synthetic peptide
DKDHIIPQSMKKDDSIINNLVLVNKNAN

SEQ ID NO: 233 - protein, 27 aa, Artificial Sequence
  Synthetic peptide
EVEHIWPRSRSFDNSPRNKTLCRKDVN

SEQ ID NO: 234 - protein, 27 aa, Artificial Sequence
  Synthetic peptide
IVNHIIPYNRSFDDTYHNRVLTLTETK

SEQ ID NO: 235 - protein, 27 aa, Artificial Sequence
  Synthetic peptide
DMEHTIPKSISFDNSDQNLTLCESYYN

SEQ ID NO: 236 - protein, 27 aa, Artificial Sequence
  Synthetic peptide
DIEHTIPRSAGGDSTKMNLTLCSSRFN

SEQ ID NO: 237 - protein, 27 aa, Artificial Sequence
  Synthetic peptide
DIEHTIPRSISQDNSQMNKTLCSLKFN

SEQ ID NO: 238 - protein, 27 aa, Artificial Sequence
  Synthetic peptide
DIDHVIPLARGGRDSLDNMVLCQSDAN

SEQ ID NO: 239 - protein, 27 aa, Artificial Sequence
  Synthetic peptide
DIEHLFPIAESEDNGRNNLVISHSACN

SEQ ID NO: 240 - protein, 27 aa, Artificial Sequence
  Synthetic peptide
DVDHIFPRDDTADNSYGNKVVAHRQCN

SEQ ID NO: 241 - protein, 27 aa, Artificial Sequence
  Synthetic peptide
DIEHIVPQSLGGLSTDYNTIVTLKSVN

SEQ ID NO: 242 - protein, 27 aa, Artificial Sequence
  Synthetic peptide
ELDHIVPRTDGGSNRHENLAITCGACN

SEQ ID NO: 243 - protein, 28 aa, Artificial Sequence
  Synthetic peptide
EMDHIVPRKGVGSTNTRTNFAAVCAECN

SEQ ID NO: 244 - protein, 28 aa, Artificial Sequence
  Synthetic peptide
EMDHIVPRKGVGSTNTRVNLAAACAACN

SEQ ID NO: 245 - protein, 28 aa, Artificial Sequence
  Synthetic peptide
EMDHIVPRAGQGSTNTRENLVAVCHRCN

SEQ ID NO: 246 - protein, 33 aa, Artificial Sequence
  Synthetic polypeptide
EIDHILPRSLIKDARGIVFNAEPNLIYASSRGN

SEQ ID NO: 247 - protein, 33 aa, Artificial Sequence
  Synthetic polypeptide
EIDHIIPRSLTGRTKKTVFNSEANLIYCSSKGN

SEQ ID NO: 248 - protein, 33 aa, Artificial Sequence
  Synthetic polypeptide
EIDHIIPRSLTLKKSESIYNSEVNLIFVSAQGN

SEQ ID NO: 249 - protein, 33 aa, Artificial Sequence
  Synthetic polypeptide
EIDHIYPRSLSKKHFGVIFNSEVNLIYCSSQGN

SEQ ID NO: 250 - protein, 33 aa, Artificial Sequence
  Synthetic polypeptide
EIDHILPRSHTLKIYGTVFNPEGNLIYVHQKCN

SEQ ID NO: 251 - protein, 30 aa, Artificial Sequence
  Synthetic polypeptide
ELDHIIPRSHKKYGTLNDEANLICVTRGDN

SEQ ID NO: 252 - protein, 27 aa, Artificial Sequence
  Synthetic peptide
ELEHIVPHSFRQSNALSSLVLTWPGVN

SEQ ID NO: 253 - protein, 28 aa, Artificial Sequence
  Synthetic peptide
YDIDHIYPRSLTKDDSFDNLVLCERTAN

SEQ ID NO: 254 - protein, 28 aa, Artificial Sequence
  Synthetic peptide
DIDHIYPRSKVIKDDSFDNLVLVLKNEN

SEQ ID NO: 255 - protein, 27 aa, Artificial Sequence
  Synthetic peptide
DRDHIYPQSKIKDDSIDNLVLVNKTYN

SEQ ID NO: 256 - protein, 27 aa, Artificial Sequence
  Synthetic peptide
DIDHIYPRSKIKDDSITNRVLVEKDIN

SEQ ID NO: 257 - protein, 27 aa, Artificial Sequence
  Synthetic peptide
DIDHIYPQSKIKDDSISNRVLVCSSCN

SEQ ID NO: 258 - protein, 27 aa, Artificial Sequence
  Synthetic peptide
DIDHIYPQSKTMDDSLNNRVLVKKNYN

SEQ ID NO: 259 - protein, 27 aa, Artificial Sequence
  Synthetic peptide
DQDHIYPKSKIYDDSLENRVLVKKNLN

SEQ ID NO: 260 - protein, 27 aa, Artificial Sequence
  Synthetic peptide
QIDHIVPQSLVKDDSFDNRVLVVPSEN

SEQ ID NO: 261 - protein, 27 aa, Artificial Sequence
  Synthetic peptide
DIDHIIPQAFIKDNSIDNRVLTSSKEN

SEQ ID NO: 262 - protein, 27 aa, Artificial Sequence
  Synthetic peptide
DIDHIIPQAFLKDNSIDNKVLVSSASN

SEQ ID NO: 263 - protein, 27 aa, Artificial Sequence
  Synthetic peptide
DIDHIIPQAYTKDNSLDNRVLVSNITN

SEQ ID NO: 264 - protein, 27 aa, Artificial Sequence
  Synthetic peptide
DIDHIVPQSFITDNSIDNLVLTSSAGN

SEQ ID NO: 265 - protein, 27 aa, Artificial Sequence
  Synthetic peptide
DVDHIVPQSFLKDDSIDNKVLTRSDKN

SEQ ID NO: 266 - protein, 27 aa, Artificial Sequence
  Synthetic peptide
NIDHIYPQSMVKDDSLDNKVLVQSEIN

SEQ ID NO: 267 - protein, 27 aa, Artificial Sequence
  Synthetic peptide
DIDHILPQSLIKDDSLDNRVLVNATIN

SEQ ID NO: 268 - protein, 27 aa, Artificial Sequence
  Synthetic peptide
DIDHILPQSFIKDDSLENRVLVKKAVN

SEQ ID NO: 269 - protein, 27 aa, Artificial Sequence
  Synthetic peptide
EVDHIFPRSFIKDDSIDNKVLVIKKMN

SEQ ID NO: 270 - protein, 27 aa, Artificial Sequence
  Synthetic peptide
EVDHIIPRSYIKDDSFENKVLVYREEN

SEQ ID NO: 271 - protein, 27 aa, Artificial Sequence
  Synthetic peptide
DIDHIIPQAVTQNDSIDNRVLVARAEN

SEQ ID NO: 272 - protein, 27 aa, Artificial Sequence
  Synthetic peptide
DIDHIVPRSISFDDSFSNLVIVNKLDN

SEQ ID NO: 273 - protein, 27 aa, Artificial Sequence
  Synthetic peptide
EIDHIIPYSISFDDSSSNKLLVLAESN

SEQ ID NO: 274 - protein, 27 aa, Artificial Sequence
  Synthetic peptide
EIDHIIPYSLCFDDSSANKVLVHKQSN

SEQ ID NO: 275 - protein, 27 aa, Artificial Sequence
  Synthetic peptide
EIDHIIPISISLDDSINNKVLVLSKAN

SEQ ID NO: 276 - protein, 27 aa, Artificial Sequence
  Synthetic peptide
EVDHIIPISISLDDSITNKVLVTHREN

SEQ ID NO: 277 - protein, 27 aa, Artificial Sequence
  Synthetic peptide
EVDHILPLSITFDDSLANKVLVYATAN

SEQ ID NO: 278 - protein, 27 aa, Artificial Sequence
  Synthetic peptide
EIDHIIPRSISFDDARSNKVLVYRSEN

SEQ ID NO: 279 - protein, 27 aa, Artificial Sequence
  Synthetic peptide
EVDHIIPRSVSFDNSYHNKVLVKQSEN

SEQ ID NO: 280 - protein, 27 aa, Artificial Sequence
  Synthetic peptide
EVDHIIPYSISWDDSYTNKVLTSAKCN

SEQ ID NO: 281 - protein, 27 aa, Artificial Sequence
  Synthetic peptide
DIDHIIPYSRSMDDSYSNKVLVLSGEN

SEQ ID NO: 282 - protein, 27 aa, Artificial Sequence
  Synthetic peptide
EIEHIIPYSMSYDNSQANKILTEKAEN

SEQ ID NO: 283 - protein, 27 aa, Artificial Sequence
  Synthetic peptide
EVDHIVPYSLILDNTINNKALVYAEEN

SEQ ID NO: 284 - protein, 27 aa, Artificial Sequence
  Synthetic peptide
EIDHVIPYSKSADDSWFNKLLVKKSTN

SEQ ID NO: 285 - protein, 27 aa, Artificial Sequence
  Synthetic peptide
EMDHILPYSRSLDNGWHNRVLVHGKDN

SEQ ID NO: 286 - protein, 27 aa, Artificial Sequence
  Synthetic peptide
EIEHVIPQSLYFDDSFSNKVICEAEVN

SEQ ID NO: 287 - protein, 27 aa, Artificial Sequence
  Synthetic peptide
DIEHIIPQARLFDDSFSNKTLEARSVN

SEQ ID NO: 288 - protein, 27 aa, Artificial Sequence
  Synthetic peptide
EIEHIVPKARVFDDSFSNKTLTFHRIN

SEQ ID NO: 289 - protein, 28 aa, Artificial Sequence
  Synthetic peptide
DKDHIIPQSMKKDDSIINNLVLVNKNAN

SEQ ID NO: 290 - protein, 27 aa, Artificial Sequence
  Synthetic peptide
QVDHILPWSRFGDDSYLNKTLCTARSN

SEQ ID NO: 291 - protein, 27 aa, Artificial Sequence
  Synthetic peptide
DIDHVIPLARGGRDSLDNMVLCQSDAN

SEQ ID NO: 292 - protein, 27 aa, Artificial Sequence
  Synthetic peptide
DMEHTIPKSISFDNSDQNLTLCESYYN

SEQ ID NO: 293 - protein, 27 aa, Artificial Sequence
  Synthetic peptide
DIEHTIPRSAGGDSTKMNLTLCSSRFN

SEQ ID NO: 294 - protein, 27 aa, Artificial Sequence
  Synthetic peptide
DIEHTIPRSISQDNSQMNKTLCSLKFN

SEQ ID NO: 295 - protein, 27 aa, Artificial Sequence
  Synthetic peptide
DIEHLFPIAESEDNGRNNLVISHSACN

SEQ ID NO: 296 - protein, 27 aa, Artificial Sequence
  Synthetic peptide
DVDHIFPRDDTADNSYGNKVVAHRQCN

SEQ ID NO: 297 - protein, 27 aa, Artificial Sequence
  Synthetic peptide
DIEHIVPQSLGGLSTDYNTIVTLKSVN

SEQ ID NO: 298 - protein, 27 aa, Artificial Sequence
  Synthetic peptide
ELDHIVPRTDGGSNRHENLAITCGACN

SEQ ID NO: 299 - protein, 28 aa, Artificial Sequence
  Synthetic peptide
EMDHIVPRKGVGSTNTRTNFAAVCAECN

SEQ ID NO: 300 - protein, 28 aa, Artificial Sequence
  Synthetic peptide
EMDHIVPRKGVGSTNTRVNLAAACAACN

SEQ ID NO: 301 - protein, 28 aa, Artificial Sequence
  Synthetic peptide
EMDHIVPRAGQGSTNTRENLVAVCHRCN

SEQ ID NO: 302 - protein, 27 aa, Artificial Sequence
  Synthetic peptide
ELEHIVPHSFRQSNALSSLVLTWPGVN

SEQ ID NO: 303 - DNA, 3333 bp, Artificial Sequence
  Synthetic polynucleotide
atggtgcctaagaagaagagaaaggtggctgccttcaaacctaattcaatcaactacatcctcggcctcgatatcggcatcgcatccgtcggctgggcgatggtagaaattgacgaagaagaaaaccccatccgcctgattgatttgggcgtgcgcgtatttgagcgtgccgaagtaccgaaaacaggcgactcccttgccatggcaaggcgtttggcgcgcagtgttcgccgcctgacccgccgtcgcgcccaccgcctgcttcggacccgccgcctattgaaacgcgaaggcgtattacaagccgccaattttgacgaaaacggcttgattaaatccttaccgaatacaccatggcaacttcgcgcagccgcattagaccgcaaactgacgcctttagagtggtcggcagtcttgttgcatttaatcaaacatcgcggctatttatcgcaacggaaaaacgagggcgaaactgccgataaggagcttggcgctttgcttaaaggcgtagccggcaatgcccatgccttacagacaggcgatttccgcacaccggccgaattggctttaaataaatttgagaaagaaagcggccatatccgcaatcagcgcagcgattattcgcatacgttcagccgcaaagatttacaggcggagctgattttgctgtttgaaaaacaaaaagaatttggcaatccgcatgtttcaggcggccttaaagaaggtattgaaaccctactgatgacgcaacgccctgccctgtccggcgatgccgttcaaaaaatgttggggcattgcaccttcgaaccggcagagccgaaagccgctaaaaacacctacacagccgaacgtttcatctggctgaccaagctgaacaacctgcgtattttagagcaaggcagcgagcggccattgaccgataccgaacgcgccacgcttatggacgagccatacagaaaatccaaactgacttacgcacaagcccgtaagctgctgggtttagaagataccgcctttttcaaaggcttgcgctatggtaaagacaatgccgaagcctcaacattgatggaaatgaaggcctaccatgccatcagccgtgcactggaaaaagaaggattgaaagacaaaaaatccccattaaacctttctcccgaattacaagacgaaatcggcacggcattctccctgttcaaaaccgatgaagacattacaggccgtctgaaagaccgtatacagcccgaaatcttagaagcgctgttgaaacacatcagcttcgataagttcgtccaaatttccttgaaagcattgcgccgaattgtgcctctaatggaacaaggcaaacgttacgatgaagcctgcgccgaaatctacggagaccattacggcaagaagaatacggaagaaaagatttatctgccgccgattcccgccgacgaaatccgcaaccccgtcgtcttgcgcgccttatctcaagcacgtaaggtcattaacggcgtggtacgccgttacggctccccagctcgtatccatattgaaactgcaagggaagtaggtaaatcgtttaaagaccgcaaagaaattgagaaacgccaagaagaaaaccgcaaagaccgggaaaaagccgccgccaaattccgagagtatttccccaattttgtcggagaacccaaatccaaagatattctgaaactgcgcctgtacgagcaacaacacggcaaatgcctgtattcgggcaaagaaatcaacttaggccgtctgaacgaaaaaggctatgtcgaaatcgaccatgccctgccgttctcgcgcacatgggacgacagtttcaacaataaagtactggtattgggcagcgaaaaccaaaacaaaggcaatcaaaccccttacgaatacttcaacggcaaagacaacagccgcgaatggcaggaatttaaagcgcgtgtcgaaaccagccgtttcccgcgcagtaaaaaacaacggattctgctgcaaaaattcgatgaagacggctttaaagaacgcaatctgaacgacacgcgctacgtcaaccgtttcctgtgtcaatttgttgccgaccgtatgcggctgacaggtaaaggcaagaaacgtgtctttgcatccaacggacaaattaccaatctgttgcgcggcttttggggattgcgcaaagtgcgtgcggaaaacgaccgccatcacgccttggacgccgtcgtcgttgcctgctcgaccgttgccatgcagcagaaaattacccgttttgtacgctataaagagatgaacgcgtttgacggtaaaaccatagacaaagaaacaggagaagtgctgcatcaaaaaacacacttcccacaaccttgggaatttttcgcacaagaagtcatgattcgcgtcttcggcaaaccggacggcaaacccgaattcgaagaagccgataccctagaaaaactgcgcacgttgcttgccgaaaaattatcatctcgccccgaagccgtacacgaatacgttacgccactgtttgtttcacgcgcgcccaatcggaagatgagcgggcaagggcatatggagaccgtcaaatccgccaaacgactggacgaaggcgtcagcgtgttgcgcgtaccgctgacacagttaaaactgaaagacttggaaaaaatggtcaatcgggagcgcgaacctaagctatacgaagcactgaaagcacggctggaagcacataaagacgatcctgccaaagcctttgccgagccgttttacaaatacgataaagcaggcaaccgcacccaacaggtaaaagccgtacgcgtagagcaagtacagaaaaccggcgtatgggtgcgcaaccataacggtattgccgacaacgcaaccatggtgcgcgtagatgtgtttgagaaaggcgacaagtattatctggtaccgatttacagttggcaggtagcgaaagggattttgccggatagggctgttgtacaaggaaaagatgaagaagattggcaacttattgatgatagtttcaactttaaattctcattacaccctaatgatttagtcgaggttataacaaaaaaagctagaatgtttggttactttgccagctgccatcgaggcacaggtaatatcaatatacgcattcatgatcttgatcataaaattggcaaaaatggaatactggaaggtatcggcgtcaaaaccgccctttcattccaaaaataccaaattgacgaactgggcaaagaaatcagaccatgccgtctgaaaaaacgcccgcctgtccgttacccatacgatgttccagattacgctgcagctccagcagcgaagaaaaagaagctggattaa

SEQ ID NO: 304 - protein, 1053 aa, Staphylococcus aureus; identical to SEQ ID NO: 26

SEQ ID NO: 305 - protein, 1368 aa, Streptococcus pyogenes [sequence omitted]

SEQ ID NO: 306 - protein, 984 aa, Campylobacter jejuni
MARILAFDIGISSIGWAFSENDELKDCGVRIFTKVENPKTGESLALPRRLARSARKRLARRKARLNHLKHLIANEFKLNYEDYQSFDESLAKAYKGSLISPYELRFRALNELLSKQDFARVILHIAKRRGYDDIKNSDDKEKGAILKAIKQNEEKLANYQSVGEYLYKEYFQKFKENSKEFTNVRNKKESYERCIAQSFLKDELKLIFKKQREFGFSFSKKFEEEVLSVAFYKRALKDFSHLVGNCSFFTDEKRAPKNSPLAFMFVALTRIINLLNNLKNTEGILYTKDDLNALLNEVLKNGTLTYKQTKKLLGLSDDYEFKGEKGTYFIEFKKYKEFIKALGEHNLSQDDLNEIAKDITLIKDEIKLKKALAKYDLNQNQIDSLSKLEFKDHLNISFKALKLVTPLMLEGKKYDEACNELNLKVAINEDKKDFLPAFNETYYKDEVTNPVVLRAIKEYRKVLNALLKKYGKVHKINIELAREVGKNHSQRAKIEKEQNENYKAKKDAELECEKLGLKINSKNILKLRLFKEQKEFCAYSGEKIKISDLQDEKMLEIDHIYPYSRSFDDSYMNKVLVFTKQNQEKLNQTPFEAFGNDSAKWQKIEVLAKNLPTKKQKRILDKNYKDKEQKNFKDRNLNDTRYIARLVLNYTKDYLDFLPLSDDENTKLNDTQKGSKVHVEAKSGMLTSALRHTWGFSAKDRNNHLHHAIDAVIIAYANNSIVKAFSDFKKEQESNSAELYAKKISELDYKNKRKFFEPFSGFRQKVLDKIDEIFVSKPERKKPSGALHEETFRKEEEFYQSYGGKEGVLKALELGKIRKVNGKIVKNGDMFRVDIFKHKKTNKFYAVPIYTMDFALKVLPNKAVARSKKGEIKDWILMDENYEFCFSLYKDSLILIQTKDMQEPEFVYYNAFTSSTVSLIVSKHDNKFETLSKNQKILFKNANEKEVIAKSIGIQNLKVFEKYIVSALGEVTKAEFRQREDFKK

SEQ ID NO: 307 - protein, 1436 aa, Bacteroides fragilis
MKRILGLDLGTNSIGWALVNEAENKDERSSIVKLGVRVNPLTVDELTNFEKGKSITTNADRTLKRGMRRNLQRYKLRRETLTEVLKEHKLITEDTILSENGNRTTFETYRLRAKAVTEEISLEEFARVLLMINKKRGYKSSRKAKGVEEGTLIDGMDIARELYNNNLTPGELCLQLLDAGKKFLPDFYRSDLQNELDRIWEKQKEYYPEILTDVLKEELRGKKRDAVWAICAKYFVWKENYTEWNKEKGKTEQQEREHKLEGIYSKRKRDEAKRENLQWRVNGLKEKLSLEQLVIVFQEMNTQINNSSGYLGAISDRSKELYFNKQTVGQYQMEMLDKNPNASLRNMVFYRQDYLDEFNMLWEKQAVYHKELTEELKKEIRDIIIFYQRRLKSQKGLIGFCEFESRQIEVDIDGKKKIKTVGNRVISRSSPLFQEFKIWQILNNIEVTVVGKKRKRRKLKENYSALFEELNDAEQLELNGSRRLCQEEKELLAQELFIRDKMTKSEVLKLLFDNPQELDLNFKTIDGNKTGYALFQAYSKMIEMSGHEPVDFKKPVEKVVEYIKAVFDLLNWNTDILGFNSNEELDNQPYYKLWHLLYSFEGDNTPTGNGRLIQKMTELYGFEKEYATILANVSFQDDYGSLSAKAIHKILPHLKEGNRYDVACVYAGYRHSESSLTREEIANKVLKDRLMLLPKNSLHNPVVEKILNQMVNVINVIIDIYGKPDEIRVELARELKKNAKEREELTKSIAQTTKAHEEYKTLLQTEFGLTNVSRTDILRYKLYKELESCGYKTLYSNTYISREKLFSKEFDIEHIIPQARLFDDSFSNKTLEARSVNIEKGNKTAYDFVKEKFGESGADNSLEHYLNNIEDLFKSGKISKTKYNKLKMAEQDIPDGFIERDLRNTQYIAKKALSMLNEISHRVVATSGSVTDKLREDWQLIDVMKELNWEKYKALGLVEYFEDRDGRQIGRIKDWTKRNDHRHHAMDALTVAFTKDVFIQYFNNKNASLDPNANEHAIKNKYFQNGRAIAPMPLREFRAEAKKHLENTLISIKAKNKVITGNINKTRKKGGVNKNMQQTPRGQLHLETIYGSGKQYLTKEEKVNASFDMRKIGTVSKSAYRDALLKRLYENDNDPKKAFAGKNSLDKQPIWLDKEQMRKVPEKVKIVTLEAIYTIRKEISPDLKVDKVIDVGVRKILIDRLNEYGNDAKKAFSNLDKNPIWLNKEKGISIKRVTISGISNAQSLHVKKDKDGKPILDENGRNIPVDFVNTGNNHHVAVYYRPVIDKRGQLVVDEAGNPKYELEEVVVSFFEAVTRANLGLPIIDKDYKTTEGWQFLFSMKQNEYFVFPNEKTGFNPKEIDLLDVENYGLISPNLFRVQKFSLKNYVFRHHLETTIKDTSSILRGITWIDFRSSKGLDTIVKVRVNHIGQIVSVGEY

SEQ ID NO: 308 - protein, 1420 aa, Bifidobacterium bifidum
MSRKNYVDDYAISLDIGNASVGWSAFTPNYRLVRAKGHELIGVRLFDPADTAESRRMARTTRRRYSRRRWRLRLLDALFDQALSEIDPSFLARRKYSWVHPDDENNADCWYGSVLFDSNEQDKRFYEKYPTIYHLRKALMEDDSQHDIREIYLAIHHMVKYRGNFLVEGTLESSNAFKEDELLKLLGRITRYEMSEGEQNSDIEQDDENKLVAPANGQLADALCATRGSRSMRVDNALEALSAVNDLSREQRAIVKAIFAGLEGNKLDLAKIFVSKEFSSENKKILGIYFNKSDYEEKCVQIVDSGLLDDEEREFLDRMQGQYNAIALKQLLGRSTSVSDSKCASYDAHRANWNLIKLQLRTKENEKDINENYGILVGWKIDSGQRKSVRGESAYENMRKKANVFFKKMIETSDLSETDKNRLIHDIEEDKLFPIQRDSDNGVIPHQLHQNELKQIIKKQGKYYPFLLDAFEKDGKQINKIEGLLTFRVPYFVGPLVVPEDLQKSDNSENHWMVRKKKGEITPWNFDEMVDKDASGRKFIERLVGTDSYLLGEPTLPKNSLLYQEYEVLNELNNVRLSVRTGNHWNDKRRMRLGREEKTLLCQRLFMKGQTVTKRTAENLLRKEYGRTYELSGLSDESKFTSSLSTYGKMCRIFGEKYVNEHRDLMEKIVELQTVFEDKETLLHQLRQLEGISEADCALLVNTHYTGWGRLSRKLLTTKAGECKISDDFAPRKHSIIEIMRAEDRNLMEIITDKQLGFSDWIEQENLGAENGSSLMEVVDDLRVSPKVKRGIIQSIRLIDDISKAVGKRPSRIFLELADDIQPSGRTISRKSRLQDLYRNANLGKEFKGIADELNACSDKDLQDDRLFLYYTQLGKDMYTGEELDLDRLSSAYDIDHIIPQAVTQNDSIDNRVLVARAENARKTDSFTYMPQIADRMRNFWQILLDNGLISRVKFERLTRQNEFSEREKERFVQRSLVETRQIMKNVATLMRQRYGNSAAVIGLNAELTKEMHRYLGFSHKNRDINDYHHAQDALCVGIAGQFAANRGFFADGEVSDGAQNSYNQYLRDYLRGYREKLSAEDRKQGRAFGFIVGSMRSQDEQKRVNPRTGEVVWSEEDKDYLRKVMNYRKMLVTQKVGDDFGALYDETRYAATDPKGIKGIPFDGAKQDTSLYGGFSSAKPAYAVLIESKGKTRLVNVTMQEYSLLGDRPSDDELRKVLAKKKSEYAKANILLRHVPKMQLIRYGGGLMVIKSAGELNNAQQLWLPYEEYCYFDDLSQGKGSLEKDDLKKLLDSILGSVQCLYPWHRFTEEELADLHVAFDKLPEDEKKNVITGIVSALHADAKTANLSIVGMTGSWRRMNNKSGYTFSDEDEFIFQSPSGLFEKRVTVGELKRKAKKEVNSKYRTNEKRLPTLSGASQP

SEQ ID NO: 309 - protein, 1397 aa, Veillonella atypica
METQTSNQLITSHLKDYPKQDYFVGLDIGTNSVGWAVTNTSYELLKFHSHKMWGSRLFEEGESAVTRRGFRSMRRRLERRKLRLKLLEELFADAMAQVDSTFFIRLHESKYHYEDKTTGHSSKHILFIDEDYTDQDYFTEYPTIYHLRKDLMENGTDDIRKLFLAVHHILKYRGNFLYEGATFNSNAFTFEDVLKQALVNITFNCFDTNSAISSISNILMESGKTKSDKAKAIERLVDTYTVFDEVNTPDKPQKEQVKEDKKTLKAFANLVLGLSANLIDLFGSVEDIDDDLKKLQIVGDTYDEKRDELAKVWGDEIHIIDDCKSVYDAIILMSIKEPGLTISQSKVKAFDKHKEDLVILKSLLKLDRNVYNEMFKSDKKGLHNYVHYIKQGRTEETSCSREDFYKYTKKIVEGLADSKDKEYILNEIELQTLLPLQRIKDNGVIPYQLHLEELKVILDKCGPKFPFLHTVSDGFSVTEKLIKMLEFRIPYYVGPLNTHHNIDNGGFSWAVRKQAGRVTPWNFEEKIDREKSAAAFIKNLTNKCTYLFGEDVLPKSSLLYSEFMLLNELNNVRIDGKALAQGVKQHLIDSIFKQDHKKMTKNRIELFLKDNNYITKKHKPEITGLDGEIKNDLTSYRDMVRILGNNFDVSMAEDIITDITIFGESKKMLRQTLRNKFGSQLNDETIKKLSKLRYRDWGRLSKKLLKGIDGCDKAGNGAPKTIIELMRNDSYNLMEILGDKFSFMECIEEENAKLAQGQVVNPHDIIDELALSPAVKRAVWQALRIVDEVAHIKKALPSRIFVEVARTNKSEKKKKDSRQKRLSDLYSAIKKDDVLQSGLQDKEFGALKSGLANYDDAALRSKKLYLYYTQMGRCAYTGNIIDLNQLNTDNYDIDHIYPRSLTKDDSFDNLVLCERTANAKKSDIYPIDNRIQTKQKPFWAFLKHQGLISERKYERLTRIAPLTADDLSGFIARQLVETNQSVKATTTLLRRLYPDIDVVFVKAENVSDFRHNNNFIKVRSLNHHHHAKDAYLNIVVGNVYHEKFTRNFRLFFKKNGANRTYNLAKMFNYDVICTNAQDGKAWDVKTSMNTVKKMMASNDVRVTRRLLEQSGALADATIYKASVAAKAKDGAYIGMKTKYSVFADVTKYGGMTKIKNAYSIIVQYTGKKGEEIKEIVPLPIYLINRNATDIELIDYVKSVIPKAKDISIKYRKLCINQLVKVNGFYYYLGGKTNDKIYIDNAIELVVPHDIATYIKLLDKYDLLRKENKTLKASSITTSIYNINTSTVVSLNKVGIDVFDYFMSKLRTPLYMKMKGNKVDELSSTGRSKFIKMTLEEQSIYLLEVLNLLTNSKTTFDVKPLGITGSRSTIGVKIHNLDEFKIINESITGLYSNEVTIV

SEQ ID NO: 310 - protein, 1363 aa, Lactobacillus rhamnosus
MTKLNQPYGIGLDIGSNSIGFAVVDANSHLLRLKGETAIGARLFREGQSAADRRGSRTTRRRLSRTRWRLSFLRDFFAPHITKIDPDFFLRQKYSEISPKDKDRFKYEKRLFNDRTDAEFYEDYPSMYHLRLHLMTHTHKADPREIFLAIHHILKSRGHFLTPGAAKDFNTDKVDLEDIFPALTEAYAQVYPDLELTFDLAKADDFKAKLLDEQATPSDTQKALVNLLLSSDGEKEIVKKRKQVLTEFAKAITGLKTKFNLALGTEVDEADASNWQFSMGQLDDKWSNIETSMTDQGTEIFEQIQELYRARLLNGIVPAGMSLSQAKVADYGQHKEDLELFKTYLKKLNDHELAKTIRGLYDRYINGDDAKPFLREDFVKALTKEVTAHPNEVSEQLLNRMGQANFMLKQRTKANGAIPIQLQQRELDQIIANQSKYYDWLAAPNPVEAHRWKMPYQLDELLNFHIPYYVGPLITPKQQAESGENVFAWMVRKDPSGNITPYNFDEKVDREASANTFIQRMKTTDTYLIGEDVLPKQSLLYQKYEVLNELNNVRINNECLGTDQKQRLIREVFERHSSVTIKQVADNLVAHGDFARRPEIRGLADEKRFLSSLSTYHQLKEILHEAIDDPTKLLDIENIITWSTVFEDHTIFETKLAEIEWLDPKKINELSGIRYRGWGQFSRKLLDGLKLGNGHTVIQELMLSNHNLMQILADETLKETMTELNQDKLKTDDIEDVINDAYTSPSNKKALRQVLRVVEDIKHAANGQDPSWLFIETADGTGTAGKRTQSRQKQIQTVYANAAQELIDSAVRGELEDKIADKASFTDRLVLYFMQGGRDIYTGAPLNIDQLSHYDIDHILPQSLIKDDSLDNRVLVNATINREKNNVFASTLFAGKMKATWRKWHEAGLISGRKLRNLMLRPDEIDKFAKGFVARQLVETRQIIKLTEQIAAAQYPNTKIIAVKAGLSHQLREELDFPKNRDVNHYHHAFDAFLAARIGTYLLKRYPKLAPFFTYGEFAKVDVKKFREFNFIGALTHAKKNIIAKDTGEIVWDKERDIRELDRIYNFKRMLITHEVYFETADLFKQTIYAAKDSKERGGSKQLIPKKQGYPTQVYGGYTQESGSYNALVRVAEADTTAYQVIKISAQNASKIASANLKSREKGKQLLNEIVVKQLAKRRKNWKPSANSFKIVIPRFGMGTLFQNAKYGLFMVNSDTYYRNYQELWLSRENQKLLKKLFSIKYEKTQMNHDALQVYKAIIDQVEKFFKLYDINQFRAKLSDAIERFEKLPINTDGNKIGKTETLRQILIGLQANGTRSNVKNLGIKTDLGLLQVGSGIKLDKDTQIVYQSPSGLFKRRIPLADL

SEQ ID NO: 311 - protein, 1365 aa, Filifactor alocis
MTKEYYLGLDVGTNSVGWAVTDSQYNLCKFKKKDMWGIRLFESANTAKDRRLQRGNRRRLERKKQRIDLLQEIFSPEICKIDPTFFIRLNESRLHLEDKSNDFKYPLFIEKDYSDIEYYKEFPTIFHLRKHLIESEEKQDIRLIYLALHNIIKTRGHFLIDGDLQSAKQLRPILDTFLLSLQEEQNLSVSLSENQKDEYEEILKNRSIAKSEKVKKLKNLFEISDELEKEEKKAQSAVIENFCKFIVGNKGDVCKFLRVSKEELEIDSFSFSEGKYEDDIVKNLEEKVPEKVYLFEQMKAMYDWNILVDILETEEYISFAKVKQYEKHKTNLRLLRDIILKYCTKDEYNRMFNDEKEAGSYTAYVGKLKKNNKKYWIEKKRNPEEFYKSLGKLLDKIEPLKEDLEVLTMMIEECKNHTLLPIQKNKDNGVIPHQVHEVELKKILENAKKYYSFLTETDKDGYSVVQKIESIFRFRIPYYVGPLSTRHQEKGSNVWMVRKPGREDRIYPWNMEEIIDFEKSNENFITRMTNKCTYLIGEDVLPKHSLLYSKYMVLNELNNVKVRGKKLPTSLKQKVFEDLFENKSKVTGKNLLEYLQIQDKDIQIDDLSGFDKDFKTSLKSYLDFKKQIFGEEIEKESIQNMIEDIIKWITIYGNDKEMLKRVIRANYSNQLTEEQMKKITGFQYSGWGNFSKMFLKGISGSDVSTGETFDIITAMWETDNNLMQILSKKFTFMDNVEDFNSGKVGKIDKITYDSTVKEMFLSPENKRAVWQTIQVAEEIKKVMGCEPKKIFIEMARGGEKVKKRTKSRKAQLLELYAACEEDCRELIKEIEDRDERDFNSMKLFLYYTQFGKCMYSGDDIDINELIRGNSKWDRDHIYPQSKIKDDSIDNLVLVNKTYNAKKSNELLSEDIQKKMHSFWLSLLNKKLITKSKYDRLTRKGDFTDEELSGFIARQLVETRQSTKAIADIFKQIYSSEVVYVKSSLVSDFRKKPLNYLKSRRVNDYHHAKDAYLNIVVGNVYNKKFTSNPIQWMKKNRDTNYSLNKVFEHDVVINGEVIWEKCTYHEDTNTYDGGTLDRIRKIVERDNILYTEYAYCEKGELFNATIQNKNGNSTVSLKKGLDVKKYGGYFSANTSYFSLIEFEDKKGDRARHIIGVPIYIANMLEHSPSAFLEYCEQKGYQNVRILVEKIKKNSLLIINGYPLRIRGENEVDTSFKRAIQLKLDQKNYELVRNIEKFLEKYVEKKGNYPIDENRDHITHEKMNQLYEVLLSKMKKFNKKGMADPSDRIEKSKPKFIKLEDLIDKINVINKMLNLLRCDNDTKADLSLIELPKNAGSFVVKKNTIGKSKIILVNQSVTGLYENRREL

SEQ ID NO: 312 - protein, 1389 aa, Oenococcus kitaharae
MARDYSVGLDIGTSSVGWAAIDNKYHLIRAKSKNLIGVRLFDSAVTAEKRRGYRTTRRRLSRRHWRLRLLNDIFAGPLTDFGDENFLARLKYSWVHPQDQSNQAHFAAGLLFDSKEQDKDFYRKYPTIYHLRLALMNDDQKHDLREVYLAIHHLVKYRGHFLIEGDVKADSAFDVHTFADAIQRYAESNNSDENLLGKIDEKKLSAALTDKHGSKSQRAETAETAFDILDLQSKKQIQAILKSVVGNQANLMAIFGLDSSAISKDEQKNYKFSFDDADIDEKIADSEALLSDTEFEFLCDLKAAFDGLTLKMLLGDDKTVSAAMVRRFNEHQKDWEYIKSHIRNAKNAGNGLYEKSKKFDGINAAYLALQSDNEDDRKKAKKIFQDEISSADIPDDVKADFLKKIDDDQFLPIQRTKNNGTIPHQLHRNELEQIIEKQGIYYPFLKDTYQENSHELNKITALINFRVPYYVGPLVEEEQKIADDGKNIPDPTNHWMVRKSNDTITPWNLSQVVDLDKSGRRFIERLTGTDTYLIGEPTLPKNSLLYQKFDVLQELNNIRVSGRRLDIRAKQDAFEHLFKVQKTVSATNLKDFLVQAGYISEDTQIEGLADVNGKNFNNALTTYNYLVSVLGREFVENPSNEELLEEITELQTVFEDKKVLRRQLDQLDGLSDHNREKLSRKHYTGWGRISKKLLTTKIVQNADKIDNQTFDVPRMNQSIIDTLYNTKMNLMEIINNAEDDFGVRAWIDKQNTTDGDEQDVYSLIDELAGPKEIKRGIVQSFRILDDITKAVGYAPKRVYLEFARKTQESHLTNSRKNQLSTLLKNAGLSELVTQVSQYDAAALQNDRLYLYFLQQGKDMYSGEKLNLDNLSNYDIDHIIPQAYTKDNSLDNRVLVSNITNRRKSDSSNYLPALIDKMRPFWSVLSKQGLLSKHKFANLTRTRDFDDMEKERFIARSLVETRQIIKNVASLIDSHFGGETKAVAIRSSLTADMRRYVDIPKNRDINDYHHAFDALLFSTVGQYTENSGLMKKGQLSDSAGNQYNRYIKEWIHAARLNAQSQRVNPFGFVVGSMRNAAPGKLNPETGEITPEENADWSIADLDYLHKVMNFRKITVTRRLKDQKGQLYDESRYPSVLHDAKSKASINFDKHKPVDLYGGFSSAKPAYAALIKFKNKFRLVNVLRQWTYSDKNSEDYILEQIRGKYPKAEMVLSHIPYGQLVKKDGALVTISSATELHNFEQLWLPLADYKLINTLLKTKEDNLVDILHNRLDLPEMTIESAFYKAFDSILSFAFNRYALHQNALVKLQAHRDDFNALNYEDKQQTLERILDALHASPASSDLKKINLSSGFGRLFSPSHFTLADTDEFIFQSVTGLFSTQKTVAQLYQETK

SEQ ID NO: 313 - protein, 1323 aa, Fructobacillus fructosus
MVYDVGLDIGTGSVGWVALDENGKLARAKGKNLVGVRLFDTAQTAADRRGFRTTRRRLSRRKWRLRLLDELFSAEINEIDSSFFQRLKYSYVHPKDEENKAHYYGGYLFPTEEETKKFHRSYPTIYHLRQELMAQPNKRFDIREIYLAIHHLVKYRGHFLSSQEKITIGSTYNPEDLANAIEVYADEKGLSWELNNPEQLTEIISGEAGYGLNKSMKADEALKLFEFDNNQDKVAIKTLLAGLTGNQIDFAKLFGKDISDKDEAKLWKLKLDDEALEEKSQTILSQLTDEEIELFHAVVQAYDGFVLIGLLNGADSVSAAMVQLYDQHREDRKLLKSLAQKAGLKHKRFSEIYEQLALATDEATIKNGISTARELVEESNLSKEVKEDTLRRLDENEFLPKQRTKANSVIPHQLHLAELQKILQNQGQYYPFLLDTFEKEDGQDNKIEELLRFRIPYYVGPLVTKKDVEHAGGDADNHWVERNEGFEKSRVTPWNFDKVFNRDKAARDFIERLTGNDTYLIGEKTLPQNSLRYQLFTVLNELNNVRVNGKKFDSKTKADLINDLFKARKTVSLSALKDYLKAQGKGDVTITGLADESKFNSSLSSYNDLKKTFDAEYLENEDNQETLEKIIEIQTVFEDSKIASRELSKLPLDDDQVKKLSQTHYTGWGRLSEKLLDSKIIDERGQKVSILDKLKSTSQNFMSIINNDKYGVQAWITEQNTGSSKLTFDEKVNELTTSPANKRGIKQSFAVLNDIKKAMKEEPRRVYLEFAREDQTSVRSVPRYNQLKEKYQSKSLSEEAKVLKKTLDGNKNKMSDDRYFLYFQQQGKDMYTGRPINFERLSQDYDIDHIIPQAFTKDDSLDNRVLVSRPENARKSDSFAYTDEVQKQDGSLWTSLLKSGFINRKKYERLTKAGKYLDGQKTGFIARQLVETRQIIKNVASLIEGEYENSKAVAIRSEITADMRLLVGIKKHREINSFHHAFDALLITAAGQYMQNRYPDRDSTNVYNEFDRYTNDYLKNLRQLSSRDEVRRLKSFGFVVGTMRKGNEDWSEENTSYLRKVMMFKNILTTKKTEKDRGPLNKETIFSPKSGKKLIPLNSKRSDTALYGGYSNVYSAYMTLVRANGKNLLIKIPISIANQIEVGNLKINDYIVNNPAIKKFEKILISKLPLGQLVNEDGNLIYLASNEYRHNAKQLWLSTTDADKIASISENSSDEELLEAYDILTSENVKNRFPFFKKDIDKLSQVRDEFLDSDKRIAVIQTILRGLQIDAAYQAPVKIISKKVSDWHKLQQSGGIKLSDNSEMIYQSATGIFETRVKISDLL

SEQ ID NO: 314 - protein, 1329 aa, Catenibacterium mitsuokai
IVDYCIGLDLGTGSVGWAVVDMNHRLMKRNGKHLWGSRLFSNAETAANRRASRSIRRRYNKRRERIRLLRAILQDMVLEKDPTFFIRLEHTSFLDEEDKAKYLGTDYKDNYNLFIDEDFNDYTYYHKYPTIYHLRKALCESTEKADPRLIYLALHHIVKYRGNFLYEGQKFNMDASNIEDKLSDIFTQFTSFNNIPYEDDEKKNLEILEILKKPLSKKAKVDEVMTLIAPEKDYKSAFKELVTGIAGNKMNVTKMILCEPIKQGDSEIKLKFSDSNYDDQFSEVEKDLGEYVEFVDALHNVYSWVELQTIMGATHTDNASISEAMVSRYNKHHDDLKLLKDCIKNNVPNKYFDMFRNDSEKSKGYYNYINRPSKAPVDEFYKYVKKCIEKVDTPEAKQILNDIELENFLLKQNSRTNGSVPYQMQLDEMIKIIDNQAEYYPILKEKREQLLSILTFRIPYYFGPLNETSEHAWIKRLEGKENQRILPWNYQDIVDVDATAEGFIKRMRSYCTYFPDEEVLPKNSLIVSKYEVYNELNKIRVDDKLLEVDVKNDIYNELFMKNKTVTEKKLKNWLVNNQCCSKDAEIKGFQKENQFSTSLTPWIDFTNIFGKIDQSNFDLIENIIYDLTVFEDKKIMKRRLKKKYALPDDKVKQILKLKYKDWSRLSKKLLDGIVADNRFGSSVTVLDVLEMSRLNLMEIINDKDLGYAQMIEEATSCPEDGKFTYEEVERLAGSPALKRGIWQSLQIVEEITKVMKCRPKYIYIEFERSEEAKERTESKIKKLENVYKDLDEQTKKEYKSVLEELKGFDNTKKISSDSLFLYFTQLGKCMYSGKKLDIDSLDKYQIDHIVPQSLVKDDSFDNRVLVVPSENQRKLDDLVVPFDIRDKMYRFWKLLFDHELISPKKFYSLIKTEYTERDEERFINRQLVETRQITKNVTQIIEDHYSTTKVAAIRANLSHEFRVKNHIYKNRDINDYHHAHDAYIVALIGGFMRDRYPNMHDSKAVYSEYMKMFRKNKNDQKRWKDGFVINSMNYPYEVDGKLIWNPDLINEIKKCFYYKDCYCTTKLDQKSGQLFNLTVLSNDAHADKGVTKAVVPVNKNRSDVHKYGGFSGLQYTIVAIEGQKKKGKKTELVKKISGVPLHLKAASINEKINYIEEKEGLSDVRIIKDNIPVNQMIEMDGGEYLLTSPTEYVNARQLVLNEKQCALIADIYNAIYKQDYDNLDDILMIQLYIELTNKMKVLYPAYRGIAEKFESMNENYVVISKEEKANIIKQMLIVMHRGPQNGNIVYDDFKISDRIGRLKTKNHNLNNIVFISQSPTGIYTKKYKL

SEQ ID NO: 315 - protein, 1348 aa, Finegoldia magna
MKSEKKYYIGLDVGTNSVGWAVTDEFYNILRAKGKDLWGVRLFEKADTAANTRIFRSGRRRNDRKGMRLQILREIFEDEIKKVDKDFYDRLDESKFWAEDKKVSGKYSLFNDKNFSDKQYFEKFPTIFHLRKYLMEEHGKVDIRYYFLAINQMMKRRGHFLIDGQISHVTDDKPLKEQLILLINDLLKIELEEELMDSIFEILADVNEKRTDKKNNLKELIKGQDFNKQEGNILNSIFESIVTGKAKIKNIISDEDILEKIKEDNKEDFVLTGDSYEENLQYFEEVLQENITLFNTLKSTYDFLILQSILKGKSTLSDAQVERYDEHKKDLEILKKVIKKYDEDGKLFKQVFKEDNGNGYVSYIGYYLNKNKKITAKKKISNIEFTKYVKGILEKQCDCEDEDVKYLLGKIEQENFLLKQISSINSVIPHQIHLFELDKILENLAKNYPSFNNKKEEFTKIEKIRKTFTFRIPYYVGPLNDYHKNNGGNAWIFRNKGEKIRPWNFEKIVDLHKSEEEFIKRMLNQCTYLPEETVLPKSSILYSEYMVLNELNNLRINGKPLDTDVKLKLIEELFKKKTKVTLKSIRDYMVRNNFADKEDFDNSEKNLEIASNMKSYIDFNNILEDKFDVEMVEDLIEKITIHTGNKKLLKKYIEETYPDLSSSQIQKIINLKYKDWGRLSRKLLDGIKGTKKETEKTDTVINFLRNSSDNLMQIIGSQNYSFNEYIDKLRKKYIPQEISYEVVENLYVSPSVKKMIWQVIRVTEEITKVMGYDPDKIFIEMAKSEEEKKTTISRKNKLLDLYKAIKKDERDSQYEKLLTGLNKLDDSDLRSRKLYLYYTQMGRDMYTGEKIDLDKLFDSTHYDKDHIIPQSMKKDDSIINNLVLVNKNANQTTKGNIYPVPSSIRNNPKIYNYWKYLMEKEFISKEKYNRLIRNTPLTNEELGGFINRQLVETRQSTKAIKELFEKFYQKSKIIPVKASLASDLRKDMNTLKSREVNDLHHAHDAFLNIVAGDVWNREFTSNPINYVKENREGDKVKYSLSKDFTRPRKSKGKVIWTPEKGRKLIVDTLNKPSVLISNESHVKKGELFNATIAGKKDYKKGKIYLPLKKDDRLQDVSKYGGYKAINGAFFFLVEHTKSKKRIRSIELFPLHLLSKFYEDKNTVLDYAINVLQLQDPKIIIDKINYRTEIIIDNFSYLISTKSNDGSITVKPNEQMYWRVDEISNLKKIENKYKKDAILTEEDRKIMESYIDKIYQQFKAGKYKNRRTTDTIIEKYEIIDLDTLDNKQLYQLLVAFISLSYKTSNNAVDFTVIGLGTECGKPRITNLPDNTYLVYKSITGIYEKRIRIK

SEQ ID NO: 316 - protein, 1384 aa, Coriobacterium glomerans
MKLRGIEDDYSIGLDMGTSSVGWAVTDERGTLAHFKRKPTWGSRLFREAQTAAVARMPRGQRRRYVRRRWRLDLLQKLFEQQMEQADPDFFIRLRQSRLLRDDRAEEHADYRWPLFNDCKFTERDYYQRFPTIYHVRSWLMETDEQADIRLIYLALHNIVKHRGNFLREGQSLSAKSARPDEALNHLRETLRVWSSERGFECSIADNGSILAMLTHPDLSPSDRRKKIAPLFDVKSDDAAADKKLGIALAGAVIGLKTEFKNIFGDFPCEDSSIYLSNDEAVDAVRSACPDDCAELFDRLCEVYSAYVLQGLLSYAPGQTISANMVEKYRRYGEDLALLKKLVKIYAPDQYRMFFSGATYPGTGIYDAAQARGYTKYNLGPKKSEYKPSESMQYDDFRKAVEKLFAKTDARADERYRMMMDRFDKQQFLRRLKTSDNGSIYHQLHLEELKAIVENQGRFYPFLKRDADKLVSLVSFRIPYYVGPLSTRNARTDQHGENRFAWSERKPGMQDEPIFPWNWESIIDRSKSAEKFILRMTGMCTYLQQEPVLPKSSLLYEEFCVLNELNGAHWSIDGDDEHRFDAADREGIIEELFRRKRTVSYGDVAGWMERERNQIGAHVCGGQGEKGFESKLGSYIFFCKDVFKVERLEQSDYPMIERIILWNTLFEDRKILSQRLKEEYGSRLSAEQIKTICKKRFTGWGRLSEKFLTGITVQVDEDSVSIMDVLREGCPVSGKRGRAMVMMEILRDEELGFQKKVDDFNRAFFAENAQALGVNELPGSPAVRRSLNQSIRIVDEIASIAGKAPANIFIEVTRDEDPKKKGRRTKRRYNDLKDALEAFKKEDPELWRELCETAPNDMDERLSLYFMQRGKCLYSGRAIDIHQLSNAGIYEVDHIIPRTYVKDDSLENKALVYREENQRKTDMLLIDPEIRRRMSGYWRMLHEAKLIGDKKFRNLLRSRIDDKALKGFIARQLVETGQMVKLVRSLLEARYPETNIISVKASISHDLRTAAELVKCREANDFHHAHDAFLACRVGLFIQKRHPCVYENPIGLSQVVRNYVRQQADIFKRCRTIPGSSGFIVNSFMTSGFDKETGEIFKDDWDAEAEVEGIRRSLNFRQCFISRMPFEDHGVFWDATIYSPRAKKTAALPLKQGLNPSRYGSFSREQFAYFFIYKARNPRKEQTLFEFAQVPVRLSAQIRQDENALERYARELAKDQGLEFIRIERSKILKNQLIEIDGDRLCITGKEEVRNACELAFAQDEMRVIRMLVSEKPVSRECVISLFNRILLHGDQASRRLSKQLKLALLSEAFSEASDNVQRNVVLGLIAIFNGSTNMVNLSDIGGSKFAGNVRIKYKKELASPKVNVHLIDQSVTGMFERRTKIGL

SEQ ID NO: 317 - protein, 1391 aa, Eubacterium yurii
MENKQYYIGLDVGTNSVGWAVTDTSYNLLRAKGKDMWGARLFEKANTAAERRTKRTSRRRSEREKARKAMLKELFADEINRVDPSFFIRLEESKFFLDDRSENNRQRYTLFNDATFTDKDYYEKYKTIFHLRSALINSDEKFDVRLVFLAILNLFSHRGHFLNASLKGDGDIQGMDVFYNDLVESCEYFEIELPRITNIDNFEKILSQKGKSRTKILEELSEELSISKKDKSKYNLIKLISGLEASVVELYNIEDIQDENKKIKIGFRESDYEESSLKVKEIIGDEYFDLVERAKSVHDMGLLSNIIGNSKYLCEARVEAYENHHKDLLKIKELLKKYDKKAYNDMFRKMTDKNYSAYVGSVNSNIAKERRSVDKRKIEDLYKYIEDTALKNIPDDNKDKIEILEKIKLGEFLKKQLTASNGVIPNQLQSRELRAILKKAENYLPFLKEKGEKNLTVSEMIIQLFEFQIPYYVGPLDKNPKKDNKANSWAKIKQGGRILPWNFEDKVDVKGSRKEFIEKMVRKCTYISDEHTLPKQSLLYEKFMVLNEINNIKIDGEKISVEAKQKIYNDLFVKGKKVSQKDIKKELISLNIMDKDSVLSGTDTVCNAYLSSIGKFTGVFKEEINKQSIVDMIEDIIFLKTVYGDEKRFVKEEIVEKYGDEIDKDKIKRILGFKFSNWGNLSKSFLELEGADVGTGEVRSIIQSLWETNFNLMELLSSRFTYMDELEKRVKKLEKPLSEWTIEDLDDMYLSSPVKRMIWQSMKIVDEIQTVIGYAPKRIFVEMTRSEGEKVRTKSRKDRLKELYNGIKEDSKQWVKELDSKDESYFRSKKMYLYYLQKGRCMYSGEVIELDKLMDDNLYDIDHIYPRSFVKDDSLDNLVLVKKEINNRKQNDPITPQIQASCQGFWKILHDQGFMSNEKYSRLTRKTQEFSDEEKLSFINRQIVETGQATKCMAQILQKSMGEDVDVVFSKARLVSEFRHKFELFKSRLINDFHHANDAYLNIVVGNSYFVKFTRNPANFIKDARKNPDNPVYKYHMDRFFERDVKSKSEVAWIGQSEGNSGTIVIVKKTMAKNSPLITKKVEEGHGSITKETIVGVKEIKFGRNKVEKADKTPKKPNLQAYRPIKTSDERLCNILRYGGRTSISISGYCLVEYVKKRKTIRSLEAIPVYLGRKDSLSEEKLLNYFRYNLNDGGKDSVSDIRLCLPFISTNSLVKIDGYLYYLGGKNDDRIQLYNAYQLKMKKEEVEYIRKIEKAVSMSKFDEIDREKNPVLTEEKNIELYNKIQDKFENTVFSKRMSLVKYNKKDLSFGDFLKNKKSKFEEIDLEKQCKVLYNIIFNLSNLKEVDLSDIGGSKSTGKCRCKKNITNYKEFKLIQQSITGLYSCEKDLMTI

SEQ ID NO: 318 - protein, 1364 aa, Peptoniphilus duerdenii
MKNLKEYYIGLDIGTASVGWAVTDESYNIPKFNGKKMWGVRLFDDAKTAEERRTQRGSRRRLNRRKERINLLQDLFATEISKVDPNFFLRLDNSDLYREDKDEKLKSKYTLFNDKDFKDRDYHKKYPTIHHLIMDLIEDEGKKDIRLLYLACHYLLKNRGHFIFEGQKFDTKNSFDKSINDLKIHLRDEYNIDLEFNNEDLIEIITDTTLNKTNKKKELKNIVGDTKFLKAISAIMIGSSQKLVDLFEDGEFEETTVKSVDFSTTAFDDKYSEYEEALGDTISLLNILKSIYDSSILENLLKDADKSKDGNKYISKAFVKKFNKHGKDLKTLKRIIKKYLPSEYANIFRNKSINDNYVAYTKSNITSNKRTKASKFTKQEDFYKFIKKHLDTIKETKLNSSENEDLKLIDEMLTDIEFKTFIPKLKSSDNGVIPYQLKLMELKKILDNQSKYYDFLNESDEYGTVKDKVESIMEFRIPYYVGPLNPDSKYAWIKRENTKITPWNFKDIVDLDSSREEFIDRLIGRCTYLKEEKVLPKASLIYNEFMVLNELNNLKLNEFLITEEMKKAIFEELFKTKKKVTLKAVSNLLKKEFNLTGDILLSGTDGDFKQGLNSYIDFKNIIGDKVDRDDYRIKIEEIIKLIVLYEDDKTYLKKKIKSAYKNDFTDDEIKKIAALNYKDWGRLSKRFLTGIEGVDKTTGEKGSIIYFMREYNLNLMELMSGHYTFTEEVEKLNPVENRELCYEMVDELYLSPSVKRMLWQSLRVVDEIKRIIGKDPKKIFIEMARAKEAKNSRKESRKNKLLEFYKFGKKAFINEIGEERYNYLLNEINSEEESKFRWDNLYLYYTQLGRCMYSLEPIDLADLKSNNIYDQDHIYPKSKIYDDSLENRVLVKKNLNHEKGNQYPIPEKVLNKNAYGFWKILFDKGLIGQKKYTRLTRRTPFEERELAEFIERQIVETRQATKETANLLKNICQDSEIVYSKAENASRFRQEFDIIKCRTVNDLHHMHDAYLNIVVGNVYNTKFTKNPLNFIKDKDNVRSYNLENMFKYDVVRGSYTAWIADDSEGNVKAATIKKVKRELEGKNYRFTRMSYIGTGGLYDQNLMRKGKGQIPQKENTNKSNIEKYGGYNKASSAYFALIESDGKAGRERTLETIPIMVYNQEKYGNTEAVDKYLKDNLELQDPKILKDKIKINSLIKLDGFLYNIKGKTGDSLSIAGSVQLIVNKEEQKLIKKMDKFLVKKKDNKDIKVTSFDNIKEEELIKLYKTLSDKLNNGIYSNKRNNQAKNISEALDKFKEISIEEKIDVLNQIILLFQSYNNGCNLKSIGLSAKTGVVFIPKKLNYKECKLINQSITGLFENEVDLLNL

SEQ ID NO: 319 - protein, 1358 aa, Acidaminococcus sp.
MGKMYYLGLDIGTNSVGYAVTDPSYHLLKFKGEPMWGAHVFAAGNQSAERRSFRTSRRRLDRRQQRVKLVQEIFAPVISPIDPRFFIRLHESALWRDDVAETDKHIFFNDPTYTDKEYYSDYPTIHHLIVDLMESSEKHDPRLVYLAVAWLVAHRGHFLNEVDKDNIGDVLSFDAFYPEFLAFLSDNGVSPWVCESKALQATLLSRNSVNDKYKALKSLIFGSQKPEDNFDANISEDGLIQLLAGKKVKVNKLFPQESNDASFTLNDKEDAIEEILGTLTPDECEWIAHIRRLFDWAIMKHALKDGRTISESKVKLYEQHHHDLTQLKYFVKTYLAKEYDDIFRNVDSETTKNYVAYSYHVKEVKGTLPKNKATQEEFCKYVLGKVKNIECSEADKVDFDEMIQRLTDNSFMPKQVSGENRVIPYQLYYYELKTILNKAASYLPFLTQCGKDAISNQDKLLSIMTFRIPYFVGPLRKDNSEHAWLERKAGKIYPWNFNDKVDLDKSEEAFIRRMTNTCTYYPGEDVLPLDSLIYEKFMILNEINNIRIDGYPISVDVKQQVFGLFEKKRRVTVKDIQNLLLSLGALDKHGKLTGIDTTIHSNYNTYHHFKSLMERGVLTRDDVERIVERMTYSDDTKRVRLWLNNNYGTLTADDVKHISRLRKHDFGRLSKMFLTGLKGVHKETGERASILDFMWNTNDNLMQLLSECYTFSDEITKLQEAYYAKAQLSLNDFLDSMYISNAVKRPIYRTLAVVNDIRKACGTAPKRIFIEMARDGESKKKRSVTRREQIKNLYRSIRKDFQQEVDFLEKILENKSDGQLQSDALYLYFAQLGRDMYTGDPIKLEHIKDQSFYNIDHIYPQSMVKDDSLDNKVLVQSEINGEKSSRYPLDAAIRNKMKPLWDAYYNHGLISLKKYQRLTRSTPFTDDEKWDFINRQLVETRQSTKALAILLKRKFPDTEIVYSKAGLSSDFRHEFGLVKSRNINDLHHAKDAFLAIVTGNVYHERFNRRWFMVNQPYSVKTKTLFTHSIKNGNFVAWNGEEDLGRIVKMLKQNKNTIHFTRFSFDRKEGLFDIQPLKASTGLVPRKAGLDVVKYGGYDKSTAAYYLLVRFTLEDKKTQHKLMMIPVEGLYKARIDHDKEFLTDYAQTTISEILQKDKQKVINIMFPMGTRHIKLNSMISIDGFYLSIGGKSSKGKSVLCHAMVPLIVPHKIECYIKAMESFARKFKENNKLRIVEKFDKITVEDNLNLYELFLQKLQHNPYNKFFSTQFDVLTNGRSTFTKLSPEEQVQTLLNILSIFKTCRSSGCDLKSINGSAQAARIMISADLTGLSKKYSDIRLVEQSASGLFVSKSQNLLEYL

SEQ ID NO: 320 - protein, 1356 aa, Lactobacillus farciminis
MTKKEQPYNIGLDIGTSSVGWAVTNDNYDLLNIKKKNLWGVRLFEEAQTAKETRLNRSTRRRYRRRKNRINWLNEIFSEELAKTDPSFLIRLQNSWVSKKDPDRKRDKYNLFIDGPYTDKEYYREFPTIFHLRKELILNKDKADIRLIYLALHNILKYRGNFTYEHQKFNISNLNNNLSKELIELNQQLIKYDISFPDDCDWNHISDILIGRGNATQKSSNILKDFTLDKETKKLLKEVINLILGNVAHLNTIFKTSLTKDEEKLNFSGKDIESKLDDLDSILDDDQFTVLDAANRIYSTITLNEILNGESYFSMAKVNQYENHAIDLCKLRDMWHTTKNEEAVEQSRQAYDDYINKPKYGTKELYTSLKKFLKVALPTNLAKEAEEKISKGTYLVKPRNSENGVVPYQLNKIEMEKIIDNQSQYYPFLKENKEKLLSILSFRIPYYVGPLQSAEKNPFAWMERKSNGHARPWNFDEIVDREKSSNKFIRRMTVTDSYLVGEPVLPKNSLIYQRYEVLNELNNIRITENLKTNPIGSRLTVETKQRIYNELFKKYKKVTVKKLTKWLIAQGYYKNPILIGLSQKDEFNSTLTTYLDMKKIFGSSFMEDNKNYDQIEELIEWLTIFEDKQILNEKLHSSKYSYTPDQIKKISNMRYKGWGRLSKKILMDITTETNTPQLLQLSNYSILDLMWATNNNFISIMSNDKYDFKNYIENHNLNKNEDQNISDLVNDIHVSPALKRGITQSIKIVQEIVKFMGHAPKHIFIEVTRETKKSEITTSREKRIKRLQSKLLNKANDFKPQLREYLVPNKKIQEELKKHKNDLSSERIMLYFLQNGKSLYSEESLNINKLSDYQVDHILPRTYIPDDSLENKALVLAKENQRKADDLLLNSNVIDRNLERWTYMLNNNMIGLKKFKNLTRRVITDKDKLGFIHRQLVQTSQMVKGVANILDNMYKNQGTTCIQARANLSTAFRKALSGQDDTYHFKHPELVKNRNVNDFHHAQDAYLASFLGTYRLRRFPTNEMLLMNGEYNKFYGQVKELYSKKKKLPDSRKNGFIISPLVNGTTQYDRNTGEIIWNVGFRDKILKIFNYHQCNVTRKTEIKTGQFYDQTIYSPKNPKYKKLIAQKKDMDPNIYGGFSGDNKSSITIVKIDNNKIKPVAIPIRLINDLKDKKTLQNWLEENVKHKKSIQIIKNNVPIGQIIYSKKVGLLSLNSDREVANRQQLILPPEHSALLRLLQIPDEDLDQILAFYDKNILVEILQELITKMKKFYPFYKGEREFLIANIENFNQATTSEKVNSLEELITLLHANSTSAHLIFNNIEKKAFGRKTHGLTLNNTDFIYQSVTGLYETRIHIE

SEQ ID NO: 321 - protein, 1421 aa, Streptococcus sanguinis
MTKFNKNYSIGLDIGVSSVGYAVVTEDYRVPAFKFKVLGNTEKEKIKKNLIGSTTFVSAQPAKGTRVFRVNRRRIDRRNHRITYLRDIFQKEIEKVDKNFYRRLDESFRVLGDKSEDLQIKQPFFGDKELETAYHKKYPTIYHLRKHLADADKNSPVADIREVYMAISHILKYRGHFLTLDKINPNNINMQNSWIDFIESCQEVFDLEISDESKNIADIFKSSENRQEKVKKILPYFQQELLKKDKSIFKQLLQLLFGLKTKFKDCFELEEEPDLNFSKENYDENLENFLGSLEEDFSDVFAKLKVLRDTILLSGMLTYTGATHARFSATMVERYEEHRKDLQRFKFFIKQNLSEQDYLDIFGRKTQNGFDVDKETKGYVGYITNKMVLTNPQKQKTIQQNFYDYISGKITGIEGAEYFLNKISDGTFLRKLRTSDNGAIPNQIHAYELEKIIERQGKDYPFLLENKDKLLSILTFKIPYYVGPLAKGSNSRFAWIKRATSSDILDDNDEDTRNGKIRPWNYQKLINMDETRDAFITNLIGNDIILLNEKVLPKRSLIYEEVMLQNELTRVKYKDKYGKAHFFDSELRQNIINGLFKNNSKRVNAKSLIKYLSDNHKDLNAIEIVSGVEKGKSFNSTLKTYNDLKTIFSEELLDSEIYQKELEEIIKVITVFDDKKSIKNYLTKFFGHLEILDEEKINQLSKLRYSGWGRYSAKLLLDIRDEDTGFNLLQFLRNDEENRNLTKLISDNTLSFEPKIKDIQSKSTIEDDIFDEIKKLAGSPAIKRGILNSIKIVDELVQIIGYPPHNIVIEMARENMTTEEGQKKAKTRKTKLESALKNIENSLLENGKVPHSDEQLQSEKLYLYYLQNGKDMYTLDKTGSPAPLYLDQLDQYEVDHIIPYSFLPIDSIDNKVLTHRENNQQKLNNIPDKETVANMKPFWEKLYNAKLISQTKYQRLTTSERTPDGVLTESMKAGFIERQLVETRQIIKHVARILDNRFSDTKIITLKSQLITNFRNTFHIAKIRELNDYHHAHDAYLAVVVGQTLLKVYPKLAPELIYGHHAHFNRHEENKATLRKHLYSNIMRFFNNPDSKVSKDIWDCNRDLPIIKDVIYNSQINFVKRTMIKKGAFYNQNPVGKFNKQLAANNRYPLKTKALCLDTSIYGGYGPMNSALSIIIIAERFNEKKGKIETVKEFHDIFIIDYEKFNNNPFQFLNDTSENGFLKKNNINRVLGFYRIPKYSLMQKIDGTRMLFESKSNLHKATQFKLTKTQNELFFHMKRLLTKSNLMDLKSKSAIKESQNFILKHKEEFDNISNQLSAFSQKMLGNTTSLKNLIKGYNERKIKEIDIRDETIKYFYDNFIKMFSFVKSGAPKDINDFFDNKCTVARMRPKPDKKLLNATLIHQSITGLYETRIDLSKLGED

SEQ ID NO: 322 - protein, 1338 aa, Coprococcus catus
MKQEYFLGLDMGTGSLGWAVTDSTYQVMRKHGKALWGTRLFESASTAEERRMFRTARRRLDRRNWRIQVLQEIFSEEISKVDPGFFLRMKESKYYPEDKRDAEGNCPELPYALFVDDNYTDKNYHKDYPTIYHLRKMLMETTEIPDIRLVYLVLHHMMKHRGHFLLSGDISQIKEFKSTFEQLIQNIQDEELEWHISLDDAAIQFVEHVLKDRNLTRSTKKSRLIKQLNAKSACEKAILNLLSGGTVKLSDIFNNKELDESERPKVSFADSGYDDYIGIVEAELAEQYYIIASAKAVYDWSVLVEILGNSVSISEAKIKVYQKHQADLKTLKKIVRQYMTKEDYKRVFVDTEEKLNNYSAYIGMTKKNGKKVDLKSKQCTQADFYDFLKKNVIKVIDHKEITQEIESEIEKENFLPKQVTKDNGVIPYQVHDYELKKILDNLGTRMPFIKENAEKIQQLFEFRIPYYVGPLNRVDDGKDGKFTWSVRKSDARIYPWNFTEVIDVEASAEKFIRRMTNKCTYLVGEDVLPKDSLVYSKFMVLNELNNLRLNGEKISVELKQRIYEELFCKYRKVTRKKLERYLVIEGIAKKGVEITGIDGDFKASLTAYHDFKERLTDVQLSQRAKEAIVLNVVLFGDDKKLLKQRLSKMYPNLTTGQLKGICSLSYQGWGRLSKTFLEEITVPAPGTGEVWNIMTALWQTNDNLMQLLSRNYGFTNEVEEFNTLKKETDLSYKTVDELYVSPAVKRQIWQTLKVVKEIQKVMGNAPKRVFVEMAREKQEGKRSDSRKKQLVELYRACKNEERDWITELNAQSDQQLRSDKLFLYYIQKGRCMYSGETIQLDELWDNTKYDIDHIYPQSKTMDDSLNNRVLVKKNYNAIKSDTYPLSLDIQKKMMSFWKMLQQQGFITKEKYVRLVRSDELSADELAGFIERQIVETRQSTKAVATILKEALPDTEIVYVKAGNVSNFRQTYELLKVREMNDLHHAKDAYLNIVVGNAYFVKFTKNAAWFIRNNPGRSYNLKRMFEFDIERSGEIAWKAGNKGSIVTVKKVMQKNNILVTRKAYEVKGGLFDQQIMKKGKGQVPIKGNDERLADIEKYGGYNKAAGTYFMLVKSLDKKGKEIRTIEFVPLYLKNQIEINHESAIQYLAQERGLNSPEILLSKIKIDTLFKVDGFKMWLSGRTGNQLIFKGANQLILSHQEAAILKGVVKYVNRKNENKDAKLSERDGMTEEKLLQLYDTFLDKLSNTVYSIRLSAQIKTLTEKRAKFIGLSNEDQCIVLNEILHMFQCQSGSANLKLIGGPGSAGILVMNNNITACKQISVINQSPTGIYEKEIDLIKL

SEQ ID NO: 323 - protein, 1345 aa, Streptococcus mutans
MKKPYSIGLDIGTNSVGWAVVTDDYKVPAKKMKVLGNTDKSHIEKNLLGALLFDSGNTAEDRRLKRTARRRYTRRRNRILYLQEIFSEEMGKVDDSFFHRLEDSFLVTEDKRGERHPIFGNLEEEVKYHENFPTIYHLRQYLADNPEKVDLRLVYLALAHIIKFRGHFLIEGKFDTRNNDVQRLFQEFLAVYDNTFENSSLQEQNVQVEEILTDKISKSAKKDRVLKLFPNEKSNGRFAEFLKLIVGNQADFKKHFELEEKAPLQFSKDTYEEELEVLLAQIGDNYAELFLSAKKLYDSILLSGILTVTDVGTKAPLSASMIQRYNEHQMDLAQLKQFIRQKLSDKYNEVFSDVSKDGYAGYIDGKTNQEAFYKYLKGLLNKIEGSGYFLDKIEREDFLRKQRTFDNGSIPHQIHLQEMRAIIRRQAEFYPFLADNQDRIEKLLTFRIPYYVGPLARGKSDFAWLSRKSADKITPWNFDEIVDKESSAEAFINRMTNYDLYLPNQKVLPKHSLLYEKFTVYNELTKVKYKTEQGKTAFFDANMKQEIFDGVFKVYRKVTKDKLMDFLEKEFDEFRIVDLTGLDKENKVFNASYGTYHDLCKILDKDFLDNSKNEKILEDIVLTLTLFEDREMIRKRLENYSDLLTKEQVKKLERRHYTGWGRLSAELIHGIRNKESRKTILDYLIDDGNSNRNFMQLINDDALSFKEEIAKAQVIGETDNLNQVVSDIAGSPAIKKGILQSLKIVDELVKIMGHQPENIVVEMARENQFTNQGRRNSQQRLKGLTDSIKEFGSQILKEHPVENSQLQNDRLFLYYLQNGRDMYTGEELDIDYLSQYDIDHIIPQAFIKDNSIDNRVLTSSKENRGKSDDVPSKDVVRKMKSYWSKLLSAKLITQRKFDNLTKAERGGLTDDDKAGFIKRQLVETRQITKHVARILDERFNTETDENNKKIRQVKIVTLKSNLVSNFRKEFELYKVREINDYHHAHDAYLNAVIGKALLGVYPQLEPEFVYGDYPHFHGHKENKATAKKFFYSNIMNFFKKDDVRTDKNGEIIWKKDEHISNIKKVLSYPQVNIVKKVEEQTGGFSKESILPKGNSDKLIPRKTKKFYWDTKKYGGFDSPIVAYSILVIADIEKGKSKKLKTVKALVGVTIMEKMTFERDPVAFLERKGYRNVQEENIIKLPKYSLFKLENGRKRLLASARELQKGNEIVLPNHLGTLLYHAKNIHKVDEPKHLDYVDKHKDEFKELLDVVSNFSKKYTLAEGNLEKIKELYAQNNGEDLKELASSFINLLTFTAIGAPATFKFFDKNIDRKRYTSTTEILNATLIHQSITGLYETRIDLNKLGGD

SEQ ID NO: 324 - protein, 1368 aa, Streptococcus pyogenes [sequence omitted]

SEQ ID NO: 325 - protein, 1388 aa, Streptococcus thermophilus
MTKPYSIGLDIGTNSVGWAVTTDNYKVPSKKMKVLGNTSKKYIKKNLLGVLLFDSGITAEGRRLKRTARRRYTRRRNRILYLQEIFSTEMATLDDAFFQRLDDSFLVPDDKRDSKYPIFGNLVEEKAYHDEFPTIYHLRKYLADSTKKADLRLVYLALAHMIKYRGHFLIEGEFNSKNNDIQKNFQDFLDTYNAIFESDLSLENSKQLEEIVKDKISKLEKKDRILKLFPGEKNSGIFSEFLKLIVGNQADFRKCFNLDEKASLHFSKESYDEDLETLLGYIGDDYSDVFLKAKKLYDAILLSGFLTVTDNETEAPLSSAMIKRYNEHKEDLALLKEYIRNISLKTYNEVFKDDTKNGYAGYIDGKTNQEDFYVYLKKLLAEFEGADYFLEKIDREDFLRKQRTFDNGSIPYQIHLQEMRAILDKQAKFYPFLAKNKERIEKILTFRIPYYVGPLARGNSDFAWSIRKRNEKITPWNFEDVIDKESSAEAFINRMTSFDLYLPEEKVLPKHSLLYETFNVYNELTKVRFIAESMRDYQFLDSKQKKDIVRLYFKDKRKVTDKDIIEYLHAIYGYDGIELKGIEKQFNSSLSTYHDLLNIINDKEFLDDSSNEAIIEEIIHTLTIFEDREMIKQRLSKFENIFDKSVLKKLSRRHYTGWGKLSAKLINGIRDEKSGNTILDYLIDDGISNRNFMQLIHDDALSFKKKIQKAQIIGDEDKGNIKEVVKSLPGSPAIKKGILQSIKIVDELVKVMGGRKPESIVVEMARENQYTNQGKSNSQQRLKRLEKSLKELGSKILKENIPAKLSKIDNNALQNDRLYLYYLQNGKDMYTGDDLDIDRLSNYDIDHIIPQAFLKDNSIDNKVLVSSASNRGKSDDVPSLEVVKKRKTFWYQLLKSKLISQRKFDNLTKAERGGLSPEDKAGFIQRQLVETRQITKHVARLLDEKFNNKKDENNRAVRTVKIITLKSTLVSQFRKDFELYKVREINDFHHAHDAYLNAVVASALLKKYPKLEPEFVYGDYPKYNSFRERKSATEKVYFYSNIMNIFKKSISLADGRVIERPLIEVNEETGESVWNKESDLATVRRVLSYPQVNVVKKVEEQNHGLDRGKPKGLFNANLSSKPKPNSNENLVGAKEYLDPKKYGGYAGISNSFTVLVKGTIEKGAKKKITNVLEFQGISILDRINYRKDKLNFLLEKGYKDIELIIELPKYSLFELSDGSRRMLASILSTNNKRGEIHKGNQIFLSQKFVKLLYHAKRISNTINENHRKYVENHKKEFEELFYYILEFNENYVGAKKNGKLLNSAFQSWQNHSIDELCSSFIGPTGSERKGLFELTSRGSAADFEFLGVKIPRYRDYTPSSLLKDATLIHQSVTGLYETRIDLAKLGEG

SEQ ID NO: 326 - protein, 1374 aa, Fusobacterium nucleatum
MKKQKFSDYYLGFDIGTNSVGWCVTDLDYNVLRFNKKDMWGSRLFDEAKTAAERRVQRNSRRRLKRRKWRLNLLEEIFSDEIMKIDSNFFRRLKESSLWLEDKNSKEKFTLFNDDNYKDYDFYKQYPTIFHLRDELIKNPEKKDIRLIYLALHSIFKSRGHFLFEGQNLKEIKNFETLYNNLISFLEDNGINKSIDKDNIEKLEKIICDSGKGLKDKEKEFKGIFNSDKQLVAIFKLSVGSSVSLNDLFDTDEYKKEEVEKEKISFREQIYEDDKPIYYSILGEKIELLDIAKSFYDFMVLNNILSDSNYISEAKVKLYEEHKKDLKNLKYIIRKYNKENYDKLFKDKNENNYPAYIGLNKEKDKKEVVEKSRLKIDDLIKVIKGYLPKPERIEEKDKTIFNEILNKIELKTILPKQRISDNGTLPYQIHEVELEKILENQSKYYDFLNYEENGVSTKDKLLKTFKFRIPYYVGPLNSYHKDKGGNSWIVRKEEGKILPWNFEQKVDIEKSAEEFIKRMTNKCTYLNGEDVIPKDSFLYSEYIILNELNKVQVNDEFLNEENKRKIIDELFKENKKVSEKKFKEYLLVNQIANRTVELKGIKDSFNSNYVSYIKFKDIFGEKLNLDIYKEISEKSILWKCLYGDDKKIFEKKIKNEYGDILNKDEIKKINSFKFNTWGRLSEKLLTGIEFINLETGECYSSVMEALRRTNYNLMELLSSKFTLQESIDNENKEMNEVSYRDLIEESYVSPSLKRAILQTLKIYEEIKKITGRVPKKVFIEMARGGDESMKNKKIPARQEQLKKLYDSCGNDIANFSIDIKEMKNSLSSYDNNSLRQKKLYLYYLQFGKCMYTGREIDLDRLLQNNDTYDIDHIYPRSKVIKDDSFDNLVLVLKNENAEKSNEYPVKKEIQEKMKSFWRFLKEKNFISDEKYKRLTGKDDFELRGFMARQLVNVRQTTKEVGKILQQIEPEIKIVYSKAEIASSFREMFDFIKVRELNDTHHAKDAYLNIVAGNVYNTKFTEKPYRYLQEIKENYDVKKIYNYDIKNAWDKENSLEIVKKNMEKNTVNITRFIKEEKGELFNLNPIKKGETSNEIISIKPKLYDGKDNKLNEKYGYYTSLKAAYFIYVEHEKKNKKVKTFERITRIDSTLIKNEKNLIKYLVSQKKLLNPKIIKKIYKEQTLIIDSYPYTFTGVDSNKKVELKNKKQLYLEKKYEQILKNALKFVEDNQGETEENYKFIYLKKRNNNEKNETIDAVKERYNIEFNEMYDKFLEKLSSKDYKNYINNKLYTNFLNSKEKFKKLKLWEKSLILREFLKIFNKNTYGKYEIKDSQTKEKLFSFPEDTGRIRLGQSSLGNNKELLEESVTGLFVKKIKL

SEQ ID NO: 327 - protein, 1333 aa, Planococcus antarcticus
MKNYTIGLDIGVASVGWVCIDENYKILNYNNRHAFGVHEFESAESAAGRRLKRGMRRRYNRRKKRLQLLQSLFDSYITDSGFFSKTDSQHFWKNNNEFENRSLTEVLSSLRISSRKYPTIYHLRSDLIESNKKMDLRLVYLALHNLVKYRGHFLQEGNWSEAASAEGMDDQLLELVTRYAELENLSPLDLSESQWKAAETLLLNRNLTKTDQSKELTAMFGKEYEPFCKLVAGLGVSLHQLFPSSEQALAYKETKTKVQLSNENVEEVMELLLEEESALLEAVQPFYQQVVLYELLKGETYVAKAKVSAFKQYQKDMASLKNLLDKTFGEKVYRSYFISDKNSQREYQKSHKVEVLCKLDQFNKEAKFAETFYKDLKKLLEDKSKTSIGTTEKDEMLRIIKAIDSNQFLQKQKGIQNAAIPHQNSLYEAEKILRNQQAHYPFITTEWIEKVKQILAFRIPYYIGPLVKDTTQSPFSWVERKGDAPITPWNFDEQIDKAASAEAFISRMRKTCTYLKGQEVLPKSSLTYERFEVLNELNGIQLRTTGAESDFRHRLSYEMKCWIIDNVFKQYKTVSTKRLLQELKKSPYADELYDEHTGEIKEVFGTQKENAFATSLSGYISMKSILGAVVDDNPAMTEELIYWIAVFEDREILHLKIQEKYPSITDVQRQKLALVKLPGWGRFSRLLIDGLPLDEQGQSVLDHMEQYSSVFMEVLKNKGFGLEKKIQKMNQHQVDGTKKIRYEDIEELAGSPALKRGIWRSVKIVEELVSIFGEPANIVLEVAREDGEKKRTKSRKDQWEELTKTTLKNDPDLKSFIGEIKSQGDQRFNEQRFWLYVTQQGKCLYTGKALDIQNLSMYEVDHILPQNFVKDDSLDNLALVMPEANQRKNQVGQNKMPLEIIEANQQYAMRTLWERLHELKLISSGKLGRLKKPSFDEVDKDKFIARQLVETRQIIKHVRDLLDERFSKSDIHLVKAGIVSKFRRFSEIPKIRDYNNKHHAMDALFAAALIQSILGKYGKNFLAFDLSKKDRQKQWRSVKGSNKEFFLFKNFGNLRLQSPVTGEEVSGVEYMKHVYFELPWQTTKMTQTGDGMFYKESIFSPKVKQAKYVSPKTEKFVHDEVKNHSICLVEFTFMKKEKEVQETKFIDLKVIEHHQFLKEPESQLAKFLAEKETNSPIIHARIIRTIPKYQKIWIEHFPYYFISTRELHNARQFEISYELMEKVKQLSERSSVEELKIVFGLLIDQMNDNYPIYTKSSIQDRVQKFVDTQLYDFKSFEIGFEELKKAVAANAQRSDTFGSRISKKPKPEEVAIGYESITGLKYRKPRSVVGTKR

SEQ ID NO: 328 - protein, 1395 aa, Treponema denticola
MKKEIKDYFLGLDVGTGSVGWAVTDTDYKLLKANRKDLWGMRCFETAETAEVRRLHRGARRRIERRKKRIKLLQELFSQEIAKTDEGFFQRMKESPFYAEDKTILQENTLFNDKDFADKTYHKAYPTINHLIKAWIENKVKPDPRLLYLACHNIIKKRGHFLFEGDFDSENQFDTSIQALFEYLREDMEVDIDADSQKVKEILKDSSLKNSEKQSRLNKILGLKPSDKQKKAITNLISGNKINFADLYDNPDLKDAEKNSISFSKDDFDALSDDLASILGDSFELLLKAKAVYNCSVLSKVIGDEQYLSFAKVKIYEKHKTDLTKLKNVIKKHFPKDYKKVFGYNKNEKNNNNYSGYVGVCKTKSKKLIINNSVNQEDFYKFLKTILSAKSEIKEVNDILTEIETGTFLPKQISKSNAEIPYQLRKMELEKILSNAEKHFSFLKQKDEKGLSHSEKIIMLLTFKIPYYIGPINDNHKKFFPDRCWVVKKEKSPSGKTTPWNFFDHIDKEKTAEAFITSRTNFCTYLVGESVLPKSSLLYSEYTVLNEINNLQIIIDGKNICDIKLKQKIYEDLFKKYKKITQKQISTFIKHEGICNKTDEVIILGIDKECTSSLKSYIELKNIFGKQVDEISTKNMLEEIIRWATIYDEGEGKTILKTKIKAEYGKYCSDEQIKKILNLKFSGWGRLSRKFLETVTSEMPGFSEPVNIITAMRETQNNLMELLSSEFTFTENIKKINSGFEDAEKQFSYDGLVKPLFLSPSVKKMLWQTLKLVKEISHITQAPPKKIFIEMAKGAELEPARTKTRLKILQDLYNNCKNDADAFSSEIKDLSGKIENEDNLRLRSDKLYLYYTQLGKCMYCGKPIEIGHVFDTSNYDIDHIYPQSKIKDDSISNRVLVCSSCNKNKEDKYPLKSEIQSKQRGFWNFLQRNNFISLEKLNRLTRATPISDDETAKFIARQLVETRQATKVAAKVLEKMFPETKIVYSKAETVSMFRNKFDIVKCREINDFHHAHDAYLNIVVGNVYNTKFTNNPWNFIKEKRDNPKIADTYNYYKVFDYDVKRNNITAWEKGKTIITVKDMLKRNTPIYTRQAACKKGELFNQTIMKKGLGQHPLKKEGPFSNISKYGGYNKVSAAYYTLIEYEEKGNKIRSLETIPLYLVKDIQKDQDVLKSYLTDLLGKKEFKILVPKIKINSLLKINGFPCHITGKTNDSFLLRPAVQFCCSNNEVLYFKKIIRFSEIRSQREKIGKTISPYEDLSFRSYIKENLWKKTKNDEIGEKEFYDLLQKKNLEIYDMLLTKHKDTIYKKRPNSATIDILVKGKEKFKSLIIENQFEVILEILKLFSATRNVSDLQHIGGSKYSGVAKIGNKISSLDNCILIYQSITGIFEKRIDLLKV

SEQ ID NO: 329 - protein, 1327 aa, Solobacterium moorei
MEGQMKNNGNNLQQGNYYLGLDVGTSSVGWAVTDTDYNVLKFRGKSMWGARLFDEASTAEERRTHRGNRRRLARRKYRLLLLEQLFEKEIRKIDDNFFVRLHESNLWADDKSKPSKFLLFNDTNFTDKDYLKKYPTIYHLRSDLIHNSTEHDIRLVFLALHHLIKYRGHFIYDNSANGDVKTLDEAVSDFEEYLNENDIEFNIENKKEFINVLSDKHLTKKEKKISLKKLYGDITDSENINISVLIEMLSGSSISLSNLFKDIEFDGKQNLSLDSDIEETLNDVVDILGDNIDLLIHAKEVYDIAVLTSSLGKHKYLCDAKVELFEKNKKDLMILKKYIKKNHPEDYKKIFSSPTEKKNYAAYSQTNSKNVCSQEEFCLFIKPYIRDMVKSENEDEVRIAKEVEDKSFLTKLKGTNNSVVPYQIHERELNQILKNIVAYLPFMNDEQEDISVVDKIKLIFKFKIPYYVGPLNTKSTRSWVYRSDEKIYPWNFSNVIDLDKTAHEFMNRLIGRCTYTNDPVLPMDSLLYSKYNVLNEINPIKVNGKAIPVEVKQAIYTDLFENSKKKVTRKSIYIYLLKNGYIEKEDIVSGIDIEIKSKLKSHHDFTQIVQENKCTPEEIERIIKGILVYSDDKSMLRRWLKNNIKGLSENDVKYLAKLNYKEWGRLSKTLLTDIYTINPEDGEACSILDIMWNTNATLMEILSNEKYQFKQNIENYKAENYDEKQNLHEELDDMYISPAARRSIWQALRIVDEIVDIKKSAPKKIFIEMAREKKSAMKKKRTESRKDTLLELYKSCKSQADGFYDEELFEKLSNESNSRLRRDQLYLYYTQMGRSMYTGKRIDFDKLINDKNTYDIDHIYPRSKIKDDSITNRVLVEKDINGEKTDIYPISEDIRQKMQPFWKILKEKGLINEEKYKRLTRNYELTDEELSSFVARQLVETQQSTKALATLLKKEYPSAKIVYSKAGNVSEFRNRKDKELPKFREINDLHHAKDAYLNIVVGNVYDTKFTEKFFNNIRNENYSLKRVFDFSVPGAWDAKGSTFNTIKKYMAKNNPIIAFAPYEVKGELFDQQIVPKGKGQFPIKQGKDIEKYGGYNKLSSAFLFAVEYKGKKARERSLETVYIKDVELYLQDPIKYCESVLGLKEPQIIKPKILMGSLFSINNKKLVVTGRSGKQYVCHHIYQLSINDEDSQYLKNIAKYLQEEPDGNIERQNILNITSVNNIKLFDVLCTKFNSNTYEIILNSLKNDVNEGREKFSELDILEQCNILLQLLKAFKCNRESSNLEKLNNKKQAGVIVIPHLFTKCSVFKVIHQSITGLFEKEMDLLK

SEQ ID NO: 330 - protein, 1334 aa, Staphylococcus pseudintermedius
MGRKPYILSLDIGTGSVGYACMDKGFNVLKYHDKDALGVYLFDGALTAQERRQFRTSRRRKNRRIKRLGLLQELLAPLVQNPNFYQFQRQFAWKNDNMDFKNKSLSEVLSFLGYESKKYPTIYHLQEALLLKDEKFDPELIYMALYHLVKYRGHFLFDHLKIENLTNNDNMHDFVELIETYENLNNIKLNLDYEKTKVIYEILKDNEMTKNDRAKRVKNMEKKLEQFSIMLLGLKFNEGKLFNHADNAEELKGANQSHTFADNYEENLTPFLTVEQSEFIERANKIYLSLTLQDILKGKKSMAMSKVAAYDKFRNELKQVKDIVYKADSTRTQFKKIFVSSKKSLKQYDATPNDQTFSSLCLFDQYLIRPKKQYSLLIKELKKIIPQDSELYFEAENDTLLKVLNTTDNASIPMQINLYEAETILRNQQKYHAEITDEMIEKVLSLIQFRIPYYVGPLVNDHTASKFGWMERKSNESIKPWNFDEVVDRSKSATQFIRRMTNKCSYLINEDVLPKNSLLYQEMEVLNELNATQIRLQTDPKNRKYRMMPQIKLFAVEHIFKKYKTVSHSKFLEIMLNSNHRENFMNHGEKLSIFGTQDDKKFASKLSSYQDMTKIFGDIEGKRAQIEEIIQWITIFEDKKILVQKLKECYPELTSKQINQLKKLNYSGWGRLSEKLLTHAYQGHSIIELLRHSDENFMEILTNDVYGFQNFIKEENQVQSNKIQHQDIANLTTSPALKKGIWSTIKLVRELTSIFGEPEKIIMEFATEDQQKGKKQKSRKQLWDDNIKKNKLKSVDEYKYIIDVANKLNNEQLQQEKLWLYLSQNGKCMYSGQSIDLDALLSPNATKHYEVDHIFPRSFIKDDSIDNKVLVIKKMNQTKGDQVPLQFIQQPYERIAYWKSLNKAGLISDSKLHKLMKPEFTAMDKEGFIQRQLVETRQISVHVRDFLKEEYPNTKVIPMKAKMVSEFRKKFDIPKIRQMNDAHHAIDAYLNGVVYHGAQLAYPNVDLFDFNFKWEKVREKWKALGEFNTKQKSRELFFFKKLEKMEVSQGERLISKIKLDMNHFKINYSRKLANIPQQFYNQTAVSPKTAELKYESNKSNEVVYKGLTPYQTYVVAIKSVNKKGKEKMEYQMIDHYVFDFYKFQNGNEKELALYLAQRENKDEVLDAQIVYSLNKGDLLYINNHPCYFVSRKEVINAKQFELTVEQQLSLYNVMNNKETNVEKLLIEYDFIAEKVINEYHHYLNSKLKEKRVRTFFSESNQTHEDFIKALDELFKVVTASATRSDKIGSRKNSMTHRAFLGKGKDVKIAYTSISGLKTTKPKSLFKLAESRNEL

SEQ ID NO: 331 - protein, 1472 aa, Flavobacterium branchiophilum
MAKILGLDLGTNSIGWAVVERENIDFSLIDKGVRIFSEGVKSEKGIESSRAAERTGYRSARKIKYRRKLRKYETLKVLSLNRMCPLSIEEVEEWKKSGFKDYPLNPEFLKWLSTDEESNVNPYFFRDRASKHKVSLFELGRAFYHIAQRRGFLSNRLDQSAEGILEEHCPKIEAIVEDLISIDEISTNITDYFFETGILDSNEKNGYAKDLDEGDKKLVSLYKSLLAILKKNESDFENCKSEIIERLNKKDVLGKVKGKIKDISQAMLDGNYKTLGQYFYSLYSKEKIRNQYTSREEHYLSEFITICKVQGIDQINEEEKINEKKFDGLAKDLYKAIFFQRPLKSQKGLIGKCSFEKSKSRCAISHPDFEEYRMWTYLNTIKIGTQSDKKLRFLTQDEKLKLVPKFYRKNDFNFDVLAKELIEKGSSFGFYKSSKKNDFFYWFNYKPTDTVAACQVAASLKNAIGEDWKTKSFKYQTINSNKEQVSRTVDYKDLWHLLTVATSDVYLYEFAIDKLGLDEKNAKAFSKTKLKKDFASLSLSAINKILPYLKEGLLYSHAVFVANIENIVDENIWKDEKQRDYIKTQISEIIENYTLEKSRFEIINGLLKEYKSENEDGKRVYYSKEAEQSFENDLKKKLVLFYKSNEIENKEQQETIFNELLPIFIQQLKDYEFIKIQRLDQKVLIFLKGKNETGQIFCTEEKGTAEEKEKKIKNRLKKLYHPSDIEKFKKKIIKDEFGNEKIVLGSPLTPSIKNPMAMRALHQLRKVLNALILEGQIDEKTIIHIEMARELNDANKRKGIQDYQNDNKKFREDAIKEIKKLYFEDCKKEVEPTEDDILRYQLWMEQNRSEIYEEGKNISICDIIGSNPAYDIEHTIPRSRSQDNSQMNKTLCSQRFNREVKKQSMPIELNNHLEILPRIAHWKEEADNLTREIEIISRSIKAAATKEIKDKKIRRRHYLTLKRDYLQGKYDRFIWEEPKVGFKNSQIPDTGIITKYAQAYLKSYFKKVESVKGGMVAEFRKIWGIQESFIDENGMKHYKVKDRSKHTHHTIDAITIACMTKEKYDVLAHAWTLEDQQNKKEARSIIEASKPWKTFKEDLLKIEEEILVSHYTPDNVKKQAKKIVRVRGKKQFVAEVERDVNGKAVPKKAASGKTIYKLDGEGKKLPRLQQGDTIRGSLHQDSIYGAIKNPLNTDEIKYVIRKDLESIKGSDVESIVDEVVKEKIKEAIANKVLLLSSNAQQKNKLVGTVWMNEEKRIAINKVRIYANSVKNPLHIKEHSLLSKSKHVHKQKVYGQNDENYAMAIYELDGKRDFELINIFNLAKLIKQGQGFYPLHKKKEIKGKIVFVPIEKRNKRDVVLKRGQQVVFYDKEVENPKDISEIVDFKGRIYIIEGLSIQRIVRPSGKVDEYGVIMLRYFKEARKADDIKQDNFKPDGVFKLGENKPTRKMNHQFTAFVEGIDFKVLPSGKFEKI

SEQ ID NO: 332 - protein, 1688 aa, Ignavibacterium album
MEFKKVLGLDIGTNSIGCALLSLPKSIQDYGKGGRLEWLTSRVIPLDADYMKAFIDGKNGLPQVITPAGKRRQKRGSRRLKHRYKLRRSRLIRVFKTLNWLPEDFPLDNPKRIKETISTEGKFSFRISDYVPISDESYREFYREFGYPENEIEQVIEEINFRRKTKGKNKNPMIKLLPEDWVVYYLRKKALIKPTTKEELIRIIYLFNQRRGFKSSRKDLTETAILDYDEFAKRLAEKEKYSAENYETKFVSITKVKEVVELKTDGRKGKKRFKVILEDSRIEPYEIERKEKPDWEGKEYTFLVTQKLEKGKFKQNKPDLPKEEDWALCTTALDNRMGSKHPGEFFFDELLKAFKEKRGYKIRQYPVNRWRYKKELEFIWTKQCQLNPELNNLNINKEILRKLATVLYPSQSKFFGPKIKEFENSDVLHIISEDIIYYQRDLKSQKSLISECRYEKRKGIDGEIYGLKCIPKSSPLYQEFRIWQDIHNIKVIRKESEVNGKKKINIDETQLYINENIKEKLFELFNSKDSLSEKDILELISLNIINSGIKISKKEEETTHRINLFANRKELKGNETKSRYRKVFKKLGFDGEYILNHPSKLNRLWHSDYSNDYADKEKTEKSILSSLGWKNRNGKWEKSKNYDVFNLPLEVAKAIANLPPLKKEYGSYSALAIRKMLVVMRDGKYWQHPDQIAKDQENTSLMLFDKNLIQLTNNQRKVLNKYLLTLAEVQKRSTLIKQKLNEIEHNPYKLELVSDQDLEKQVLKSFLEKKNESDYLKGLKTYQAGYLIYGKHSEKDVPIVNSPDELGEYIRKKLPNNSLRNPIVEQVIRETIFIVRDVWKSFGIIDEIHIELGRELKNNSEERKKTSESQEKNFQEKERARKLLKELLNSSNFEHYDENGNKIFSSFTVNPNPDSPLDIEKFRIWKNQSGLTDEELNKKLKDEKIPTEIEVKKYILWLTQKCRSPYTGKIIPLSKLFDSNVYEIEHIIPRSKMKNDSTNNLVICELGVNKAKGDRLAANFISESNGKCKFGEVEYTLLKYGDYLQYCKDTFKYQKAKYKNLLATEPPEDFIERQINDTRYIGRKLAELLTPVVKDSKNIIFTIGSITSELKITWGLNGVWKDILRPRFKRLESIINKKLIFQDEDDPNKYHFDLSINPQLDKEGLKRLDHRHHALDATIIAATTREHVRYLNSLNAADNDEEKREYFLSLCNHKIRDFKLPWENFTSEVKSKLLSCVVSYKESKPILSDPFNKYLKWEYKNGKWQKVFAIQIKNDRWKAVRRSMFKEPIGTVWIKKIKEVSLKEAIKIQAIWEEVKNDPVRKKKEKYIYDDYAQKVIAKIVQELGLSSSMRKQDDEKLNKFINEAKVSAGVNKNLNTTNKTIYNLEGRFYEKIKVAEYVLYKAKRMPLNKKEYIEKLSLQKMFNDLPNFILEKSILDNYPEILKELESDNKYIIEPHKKNNPVNRLLLEHILEYHNNPKEAFSTEGLEKLNKKAINKIGKPIKYITRLDGDINEEEIFRGAVFETDKGSNVYFVMYENNQTKDREFLKPNPSISVLKAIEHKNKIDFFAPNRLGFSRIILSPGDLVYVPTNDQYVLIKDNSSNETIINWDDNEFISNRIYQVKKFTGNSCYFLKNDIASLILSYSASNGVGEFGSQNISEYSVDDPPIRIKDVCIKIRVDRLGNVRPL

SEQ ID NO: 333 - protein, 1415 aa, Bergeyella zoohelcum
MKHILGLDLGTNSIGWALIERNIEEKYGKIIGMGSRIVPMGAELSKFEQGQAQTKNADRRTNRGARRLNKRYKQRRNKLIYILQKLDMLPSQIKLKEDFSDPNKIDKITILPISKKQEQLTAFDLVSLRVKALTEKVGLEDLGKIIYKYNQLRGYAGGSLEPEKEDIFDEEQSKDKKNKSFIAFSKIVFLGEPQEEIFKNKKLNRRAIIVETEEGNFEGSTFLENIKVGDSLELLINISASKSGDTITIKLPNKTNWRKKMENIENQLKEKSKEMGREFYISEFLLELLKENRWAKIRNNTILRARYESEFEAIWNEQVKHYPFLENLDKKTLIEIVSFIFPGEKESQKKYRELGLEKGLKYIIKNQVVFYQRELKDQSHLISDCRYEPNEKAIAKSHPVFQEYKVWEQINKLIVNTKIEAGTNRKGEKKYKYIDRPIPTALKEWIFEELQNKKEITFSAIFKKLKAEFDLREGIDFLNGMSPKDKLKGNETKLQLQKSLGELWDVLGLDSINRQIELWNILYNEKGNEYDLTSDRTSKVLEFINKYGNNIVDDNAEETAIRISKIKFARAYSSLSLKAVERILPLVRAGKYFNNDFSQQLQSKILKLLNENVEDPFAKAAQTYLDNNQSVLSEGGVGNSIATILVYDKHTAKEYSHDELYKSYKEINLLKQGDLRNPLVEQIINEALVLIRDIWKNYGIKPNEIRVELARDLKNSAKERATIHKRNKDNQTINNKIKETLVKNKKELSLANIEKVKLWEAQRHLSPYTGQPIPLSDLFDKEKYDVDHIIPISRYFDDSFTNKVISEKSVNQEKANRTAMEYFEVGSLKYSIFTKEQFIAHVNEYFSGVKRKNLLATSIPEDPVQRQIKDTQYIAIRVKEELNKIVGNENVKTTTGSITDYLRNHWGLTDKFKLLLKERYEALLESEKFLEAEYDNYKKDFDSRKKEYEEKEVLFEEQELTREEFIKEYKENYIRYKKNKLIIKGWSKRIDHRHHAIDALIVACTEPAHIKRLNDLNKVLQDWLVEHKSEFMPNFEGSNSELLEEILSLPENERTEIFTQIEKFRAIEMPWKGFPEQVEQKLKEIIISHKPKDKLLLQYNKAGDRQIKLRGQLHEGTLYGISQGKEAYRIPLTKFGGSKFATEKNIQKIVSPFLSGFIANHLKEYNNKKEEAFSAEGIMDLNNKLAQYRNEKGELKPHTPISTVKIYYKDPSKNKKKKDEEDLSLQKLDREKAFNEKLYVKTGDNYLFAVLEGEIKTKKTSQIKRLYDIISFFDATNFLKEEFRNAPDKKTFDKDLLFRQYFEERNKAKLLFTLKQGDFVYLPNENEEVILDKESPLYNQYWGDLKERGKNIYVVQKFSKKQIYFIKHTIADIIKKDVEFGSQNCYETVEGRSIKENCFKLEIDRLGNIVKVIKR

SEQ ID NO: 334 - protein, 1166 aa, Nitrobacter hamburgensis
MHVEIDFPHFSRGDSHLAMNKNEILRGSSVLYRLGLDLGSNSLGWFVTHLEKRGDRHEPVALGPGGVRIFPDGRDPQSGTSNAVDRRMARGARKRRDRFVERRKELIAALIKYNLLPDDARERRALEVLDPYALRKTALTDTLPAHHVGRALFHLNQRRGFQSNRKTDSKQSEDGAIKQAASRLATDKGNETLGVFFADMHLRKSYEDRQTAIRAELVRLGKDHLTGNARKKIWAKVRKRLFGDEVLPRADAPHGVRARATITGTKASYDYYPTRDMLRDEFNAIWAGQSAHHATITDEARTEIEHIIFYQRPLKPAIVGKCTLDPATRPFKEDPEGYRAPWSHPLAQRFRILSEARNLEIRDTGKGSRRLTKEQSDLVVAALLANREVKFDKLRTLLKLPAEARFNLESDRRAALDGDQTAARLSDKKGFNKAWRGFPPERQIAIVARLEETEDENELIAWLEKECALDGAAAARVANTTLPDGHCRLGLRAIKKIVPIMQDGLDEDGVAGAGYHIAAKRAGYDHAKLPTGEQLGRLPYYGQWLQDAVVGSGDARDQKEKQYGQFPNPTVHIGLGQLRRVVNDLIDKYGPPTEISIEFTRALKLSEQQKAERQREQRRNQDKNKARAEELAKFGRPANPRNLLKMRLWEELAHDPLDRKCVYTGEQISIERLLSDEVDIDHILPVAMTLDDSPANKIICMRYANRHKRKQTPSEAFGSSPTLQGHRYNWDDIAARATGLPRNKRWRFDANAREEFDKRGGFLARQLNETGWLARLAKQYLGAVTDPNQIWVVPGRLTSMLRGKWGLNGLLPSDNYAGVQDKAEEFLASTDDMEFSGVKNRADHRHHAIDGLVTALTDRSLLWKMANAYDEEHEKFVIEPPWPTMRDDLKAALEKMVVSHKPDHGIEGKLHEDSAYGFVKPLDATGLKEEEAGNLVYRKAIESLNENEVDRIRDIQLRTIVRDHVNVEKTKGVALADALRQLQAPSDDYPQFKHGLRHVRILKKEKGDYLVPIANRASGVAYKAYSAGENFCVEVFETAGGKWDGEAVRRFDANKKNAGPKIAHAPQWRDANEGAKLVMRIHKGDLIRLDHEGRARIMVVHRLDAAAGRFKLADHNETGNLDKRHATNNDIDPFRWLMASYNTLKKLAAVPVRVDELGRVWRVMPN

SEQ ID NO: 335 - protein, 1498 aa, Odoribacter laneus
METTLGIDLGTNSIGLALVDQEEHQILYSGVRIFPEGINKDTIGLGEKEESRNATRRAKRQMRRQYFRKKLRKAKLLELLIAYDMCPLKPEDVRRWKNWDKQQKSTVRQFPDTPAFREWLKQNPYELRKQAVTEDVTRPELGRILYQMIQRRGFLSSRKGKEEGKIFTGKDRMVGIDETRKNLQKQTLGAYLYDIAPKNGEKYRFRTERVRARYTLRDMYIREFEIIWQRQAGHLGLAHEQATRKKNIFLEGSATNVRNSKLITHLQAKYGRGHVLIEDTRITVTFQLPLKEVLGGKIEIEEEQLKFKSNESVLFWQRPLRSQKSLLSKCVFEGRNFYDPVHQKWIIAGPTPAPLSHPEFEEFRAYQFINNIIYGKNEHLTAIQREAVFELMCTESKDFNFEKIPKHLKLFEKFNFDDTTKVPACTTISQLRKLFPHPVWEEKREEIWHCFYFYDDNTLLFEKLQKDYALQTNDLEKIKKIRLSESYGNVSLKAIRRINPYLKKGYAYSTAVLLGGIRNSFGKRFEYFKEYEPEIEKAVCRILKEKNAEGEVIRKIKDYLVHNRFGFAKNDRAFQKLYHHSQAITTQAQKERLPETGNLRNPIVQQGLNELRRTVNKLLATCREKYGPSFKFDHIHVEMGRELRSSKTEREKQSRQIRENEKKNEAAKVKLAEYGLKAYRDNIQKYLLYKEIEEKGGTVCCPYTGKTLNISHTLGSDNSVQIEHIIPYSISLDDSLANKTLCDATFNREKGELTPYDFYQKDPSPEKWGASSWEEIEDRAFRLLPYAKAQRFIRRKPQESNEFISRQLNDTRYISKKAVEYLSAICSDVKAFPGQLTAELRHLWGLNNILQSAPDITFPLPVSATENHREYYVITNEQNEVIRLFPKQGETPRTEKGELLLTGEVERKVFRCKGMQEFQTDVSDGKYWRRIKLSSSVTWSPLFAPKPISADGQIVLKGRIEKGVFVCNQLKQKLKTGLPDGSYWISLPVISQTFKEGESVNNSKLTSQQVQLFGRVREGIFRCHNYQCPASGADGNFWCTLDTDTAQPAFTPIKNAPPGVGGGQIILTGDVDDKGIFHADDDLHYELPASLPKGKYYGIFTVESCDPTLIPIELSAPKTSKGENLIEGNIWVDEHTGEVRFDPKKNREDQRHHAIDAIVIALSSQSLFQRLSTYNARRENKKRGLDSTEHFPSPWPGFAQDVRQSVVPLLVSYKQNPKTLCKISKTLYKDGKKIHSCGNAVRGQLHKETVYGQRTAPGATEKSYHIRKDIRELKTSKHIGKVVDITIRQMLLKHLQENYHIDITQEFNIPSNAFFKEGVYRIFLPNKHGEPVPIKKIRMKEELGNAERLKDNINQYVNPRNNHHVMIYQDADGNLKEEIVSFWSVIERQNQGQPIYQLPREGRNIVSILQINDTFLIGLKEEEPEVYRNDLSTLSKHLYRVQKLSGMYYTFRHHLASTLNNEREEFRIQSLEAWKRANPVKVQIDEIGRITFLNGPLC

SEQ ID NO: 336 - protein, 1372 aa, Legionella pneumophila
MESSQILSPIGIDLGGKFTGVCLSHLEAFAELPNHANTKYSVILIDHNNFQLSQAQRRATRHRVRNKKRNQFVKRVALQLFQHILSRDLNAKEETALCHYLNNRGYTYVDTDLDEYIKDETTINLLKELLPSESEHNFIDWFLQKMQSSEFRKILVSKVEEKKDDKELKNAVKNIKNFITGFEKNSVEGHRHRKVYFENIKSDITKDNQLDSIKKKIPSVCLSNLLGHLSNLQWKNLHRYLAKNPKQFDEQTFGNEFLRMLKNFRHLKGSQESLAVRNLIQQLEQSQDYISILEKTPPEITIPPYEARTNTGMEKDQSLLLNPEKLNNLYPNWRNLIPGIIDAHPFLEKDLEHTKLRDRKRIISPSKQDEKRDSYILQRYLDLNKKIDKFKIKKQLSFLGQGKQLPANLIETQKEMETHFNSSLVSVLIQIASAYNKEREDAAQGIWFDNAFSLCELSNINPPRKQKILPLLVGAILSEDFINNKDKWAKFKIFWNTHKIGRTSLKSKCKEIEEARKNSGNAFKIDYEEALNHPEHSNNKALIKIIQTIPDIIQAIQSHLGHNDSQALIYHNPFSLSQLYTILETKRDGFHKNCVAVTCENYWRSQKTEIDPEISYASRLPADSVRPFDGVLARMMQRLAYEIAMAKWEQIKHIPDNSSLLIPIYLEQNRFEFEESFKKIKGSSSDKTLEQAIEKQNIQWEEKFQRIINASMNICPYKGASIGGQGEIDHIYPRSLSKKHFGVIFNSEVNLIYCSSQGNREKKEEHYLLEHLSPLYLKHQFGTDNVSDIKNFISQNVANIKKYISFHLLTPEQQKAARHALFLDYDDEAFKTITKFLMSQQKARVNGTQKFLGKQIMEFLSTLADSKQLQLEFSIKQITAEEVHDHRELLSKQEPKLVKSRQQSFPSHAIDATLTMSIGLKEFPQFSQELDNSWFINHLMPDEVHLNPVRSKEKYNKPNISSTPLFKDSLYAERFIPVWVKGETFAIGFSEKDLFEIKPSNKEKLFTLLKTYSTKNPGESLQELQAKSKAKWLYFPINKTLALEFLHHYFHKEIVTPDDTTVCHFINSLRYYTKKESITVKILKEPMPVLSVKFESSKKNVLGSFKHTIALPATKDWERLFNHPNFLALKANPAPNPKEFNEFIRKYFLSDNNPNSDIPNNGHNIKPQKHKAVRKVFSLPVIPGNAGTMMRIRRKDNKGQPLYQLQTIDDTPSMGIQINEDRLVKQEVLMDAYKTRNLSTIDGINNSEGQAYATFDNWLTLPVSTFKPEIIKLEMKPHSKTRRYIRITQSLADFIKTIDEALMIKPSDSIDDPLNMPNEIVCKNKLFGNELKPRDGKMKIVSTGKIVTYEFESDSTPQWIQTLYVTQLKKQP

SEQ ID NO: 337 - protein, 1517 aa, Bacteroides sp.
MKKIVGLDLGTNSIGWALINAYINKEHLYGIEACGSRIIPMDAAILGNFDKGNSISQTADRTSYRGIRRLRERHLLRRERLHRILDLLGFLPKHYSDSLNRYGKFLNDIECKLPWVKDETGSYKFIFQESFKEMLANFTEHHPILIANNKKVPYDWTIYYLRKKALTQKISKEELAWILLNFNQKRGYYQLRGEEEETPNKLVEYYSLKVEKVEDSGERKGKDTWYNVHLENGMIYRRTSNIPLDWEGKTKEFIVTTDLEADGSPKKDKEGNIKRSFRAPKDDDWTLIKKKTEADIDKIKMTVGAYIYDTLLQKPDQKIRGKLVRTIERKYYKNELYQILKTQSEFHEELRDKQLYIACLNELYPNNEPRRNSISTRDFCHLFIEDIIFYQRPLKSKKSLIDNCPYEENRYIDKESGEIKHASIKCIAKSHPLYQEFRLWQFIVNLRIYRKETDVDVTQELLPTEADYVTLFEWLNEKKEIDQKAFFKYPPFGFKKTTSNYRWNYVEDKPYPCNETHAQIIARLGKAHIPKAFLSKEKEETLWHILYSIEDKQEIEKALHSFANKNNLSEEFIEQFKNFPPFKKEYGSYSAKAIKKLLPLMRMGKYWSIENIDNGTRIRINKIIDGEYDENIRERVRQKAINLTDITHFRALPLWLACYLVYDRHSEVKDIVKWKTPKDIDLYLKSFKQHSLRNPIVEQVITETLRTVRDIWQQVGHIDEIHIELGREMKNPADKRARMSQQMIKNENTNLRIKALLTEFLNPEFGIENVRPYSPSQQDLLRIYEEGVLNSILELPEDIGIILGKFNQTDTLKRPTRSEILRYKLWLEQKYRSPYTGEMIPLSKLFTPAYEIEHIIPQSRYFDDSLSNKVICESEINKLKDRSLGYEFIKNHHGEKVELAFDKPVEVLSVEAYEKLVHESYSHNRSKMKKLLMEDIPDQFIERQLNDSRYISKVVKSLLSNIVREENEQEAISKNVIPCTGGITDRLKKDWGINDVWNKIVLPRFIRLNELTESTRFTSINTNNTMIPSMPLELQKGFNKKRIDHRHHAMDAIIIACANRNIVNYLNNVSASKNTKITRRDLQTLLCHKDKTDNNGNYKWVIDKPWETFTQDTLTALQKITVSFKQNLRVINKTTNHYQHYENGKKIVSNQSKGDSWAIRKSMHKETVHGEVNLRMIKTVSFNEALKKPQAIVEMDLKKKILAMLELGYDTKRIKNYFEENKDTWQDINPSKIKVYYFTKETKDRYFAVRKPIDTSFDKKKIKESITDTGIQQIMLRHLETKDNDPTLAFSPDGIDEMNRNILILNKGKKHQPIYKVRVYEKAEKFTVGQKGNKRTKFVEAAKGTNLFFAIYETEEIDKDTKKVIRKRSYSTIPLNVVIERQKQGLSSAPEDENGNLPKYILSPNDLVYVPTQEEINKGEVVMPIDRDRIYKMVDSSGITANFIPASTANLIFALPKATAEIYCNGENCIQNEYGIGSPQSKNQKAITGEMVKEICFPIKVDRLGNIIQVGSCILTN

SEQ ID NO: 338 - protein, 1101 aa, Akkermansia muciniphila
MSRSLTFSFDIGYASIGWAVIASASHDDADPSVCGCGTVLFPKDDCQAFKRREYRRLRRNIRSRRVRIERIGRLLVQAQIITPEMKETSGHPAPFYLASEALKGHRTLAPIELWHVLRWYAHNRGYDNNASWSNSLSEDGGNGEDTERVKHAQDLMDKHGTATMAETICRELKLEEGKADAPMEVSTPAYKNLNTAFPRLIVEKEVRRILELSAPLIPGLTAEIIELIAQHHPLTTEQRGVLLQHGIKLARRYRGSLLFGQLIPRFDNRIISRCPVTWAQVYEAELKKGNSEQSARERAEKLSKVPTANCPEFYEYRMARILCNIRADGEPLSAEIRRELMNQARQEGKLTKASLEKAISSRLGKETETNVSNYFTLHPDSEEALYLNPAVEVLQRSGIGQILSPSVYRIAANRLRRGKSVTPNYLLNLLKSRGESGEALEKKIEKESKKKEADYADTPLKPKYATGRAPYARTVLKKVVEEILDGEDPTRPARGEAHPDGELKAHDGCLYCLLDTDSSVNQHQKERRLDTMTNNHLVRHRMLILDRLLKDLIQDFADGQKDRISRVCVEVGKELTTFSAMDSKKIQRELTLRQKSHTDAVNRLKRKLPGKALSANLIRKCRIAMDMNWTCPFTGATYGDHELENLELEHIVPHSFRQSNALSSLVLTWPGVNRMKGQRTGYDFVEQEQENPVPDKPNLHICSLNNYRELVEKLDDKKGHEDDRRRKKKRKALLMVRGLSHKHQSQNHEAMKEIGMTEGMMTQSSHLMKLACKSIKTSLPDAHIDMIPGAVTAEVRKAWDVFGVFKELCPEAADPDSGKILKENLRSLTHLHHALDACVLGLIPYIIPAHHNGLLRRVLAMRRIPEKLIPQVRPVANQRHYVLNDDGRMMLRDLSASLKENIREQLMEQRVIQHVPADMGGALLKETMQRVLSVDGSGEDAMVSLSKKKDGKKEKNQVKASKLVGVFPEGPSKLKALKAAIEIDGNYGVALDPKPVVIRHIKVFKRIMALKEQNGGKPVRILKKGMLIHLTSSKDPKHAGVWRIESIQDSKGGVKLDLQRAHCAVPKNKTHECNWREVDLISLLKKYQMKRYPTSYTGTPR

SEQ ID NO: 339 - protein, 1424 aa, Prevotella sp.
MTQKVLGLDLGTNSIGSAVRNLDLSDDLQWQLEFFSSDIFRSSVNKESNGREYSLAAQRSAHRRSRGLNEVRRRRLWATLNLLIKHGFCPMSSESLMRWCTYDKRKGLFREYPIDDKDFNAWILLDFNGDGRPDYSSPYQLRRELVTRQFDFEQPIERYKLGRALYHIAQHRGFKSSKGETLSQQETNSKPSSTDEIPDVAGAMKASEEKLSKGLSTYMKEHNLLTVGAAFAQLEDEGVRVRNNNDYRAIRSQFQHEIETIFKFQQGLSVESELYERLISEKKNVGTIFYKRPLRSQRGNVGKCTLERSKPRCAIGHPLFEKFRAWTLINNIKVRMSVDTLDEQLPMKLRLDLYNECFLAFVRTEFKFEDIRKYLEKRLGIHFSYNDKTINYKDSTSVAGCPITARFRKMLGEEWESFRVEGQKERQAHSKNNISFHRVSYSIEDIWHFCYDAEEPEAVLAFAQETLRLERKKAEELVRIWSAMPQGYAMLSQKAIRNINKILMLGLKYSDAVILAKVPELVDVSDEELLSIAKDYYLVEAQVNYDKRINSIVNGLIAKYKSVSEEYRFADHNYEYLLDESDEKDIIRQIENSLGARRWSLMDANEQTDILQKVRDRYQDFFRSHERKFVESPKLGESFENYLTKKFPMVEREQWKKLYHPSQITIYRPVSVGKDRSVLRLGNPDIGAIKNPTVLRVLNTLRRRVNQLLDDGVISPDETRVVVETARELNDANRKWALDTYNRIRHDENEKIKKILEEFYPKRDGISTDDIDKARYVIDQREVDYFTGSKTYNKDIKKYKFWLEQGGQCMYTGRTINLSNLFDPNAFDIEHTIPESLSFDSSDMNLTLCDAHYNRFIKKNHIPTDMPNYDKAITIDGKEYPAITSQLQRWVERVERLNRNVEYWKGQARRAQNKDRKDQCMREMHLWKMELEYWKKKLERFTVTEVTDGFKNSQLVDTRVITRHAVLYLKSIFPHVDVQRGDVTAKFRKILGIQSVDEKKDRSLHSHHAIDATTLTIIPVSAKRDRMLELFAKIEEINKMLSFSGSEDRTGLIQELEGLKNKLQMEVKVCRIGHNVSEIGTFINDNIIVNHHIKNQALTPVRRRLRKKGYIVGGVDNPRWQTGDALRGEIHKASYYGAITQFAKDDEGKVLMKEGRPQVNPTIKFVIRRELKYKKSAADSGFASWDDLGKAIVDKELFALMKGQFPAETSFKDACEQGIYMIKKGKNGMPDIKLHHIRHVRCEAPQSGLKIKEQTYKSEKEYKRYFYAAVGDLYAMCCYTNGKIREFRIYSLYDVSCHRKSDIEDIPEFITDKKGNRLMLDYKLRTGDMILLYKDNPAELYDLDNVNLSRRLYKINRFESQSNLVLMTHHLSTSKERGRSLGKTVDYQNLPESIRSSVKSLNFLIMGENRDFVIKNGKIIFNHR

SEQ ID NO: 340 - protein, 1409 aa, Wolinella succinogenes
MLVSPISVDLGGKNTGFFSFTDSLDNSQSGTVIYDESFVLSQVGRRSKRHSKRNNLRNKLVKRLFLLILQEHHGLSIDVLPDEIRGLFNKRGYTYAGFELDEKKKDALESDTLKEFLSEKLQSIDRDSDVEDFLNQIASNAESFKDYKKGFEAVFASATHSPNKKLELKDELKSEYGENAKELLAGLRVTKEILDEFDKQENQGNLPRAKYFEELGEYIATNEKVKSFFDSNSLKLTDMTKLIGNISNYQLKELRRYFNDKEMEKGDIWIPNKLHKITERFVRSWHPKNDADRQRRAELMKDLKSKEIMELLTTTEPVMTIPPYDDMNNRGAVKCQTLRLNEEYLDKHLPNWRDIAKRLNHGKFNDDLADSTVKGYSEDSTLLHRLLDTSKEIDIYELRGKKPNELLVKTLGQSDANRLYGFAQNYYELIRQKVRAGIWVPVKNKDDSLNLEDNSNMLKRCNHNPPHKKNQIHNLVAGILGVKLDEAKFAEFEKELWSAKVGNKKLSAYCKNIEELRKTHGNTFKIDIEELRKKDPAELSKEEKAKLRLTDDVILNEWSQKIANFFDIDDKHRQRFNNLFSMAQLHTVIDTPRSGFSSTCKRCTAENRFRSETAFYNDETGEFHKKATATCQRLPADTQRPFSGKIERYIDKLGYELAKIKAKELEGMEAKEIKVPIILEQNAFEYEESLRKSKTGSNDRVINSKKDRDGKKLAKAKENAEDRLKDKDKRIKAFSSGICPYCGDTIGDDGEIDHILPRSHTLKIYGTVFNPEGNLIYVHQKCNQAKADSIYKLSDIKAGVSAQWIEEQVANIKGYKTFSVLSAEQQKAFRYALFLQNDNEAYKKVVDWLRTDQSARVNGTQKYLAKKIQEKLTKMLPNKHLSFEFILADATEVSELRRQYARQNPLLAKAEKQAPSSHAIDAVMAFVARYQKVFKDGTPPNADEVAKLAMLDSWNPASNEPLTKGLSTNQKIEKMIKSGDYGQKNMREVFGKSIFGENAIGERYKPIVVQEGGYYIGYPATVKKGYELKNCKVVTSKNDIAKLEKIIKNQDLISLKENQYIKIFSINKQTISELSNRYFNMNYKNLVERDKEIVGLLEFIVENCRYYTKKVDVKFAPKYIHETKYPFYDDWRRFDEAWRYLQENQNKTSSKDRFVIDKSSLNEYYQPDKNEYKLDVDTQPIWDDFCRWYFLDRYKTANDKKSIRIKARKTFSLLAESGVQGKVFRAKRKIPTGYAYQALPMDNNVIAGDYANILLEANSKTLSLVPKSGISIEKQLDKKLDVIKKTDVRGLAIDNNSFFNADFDTHGIRLIVENTSVKVGNFPISAIDKSAKRMIFRALFEKEKGKRKKKTTISFKESGPVQDYLKVFLKKIVKIQLRTDGSISNIVVRKNAADFTLSFRSEHIQKLLK

SEQ ID NO: 341 - protein, 1146 aa, Alicyclobacillus hesperidum
MAYRLGLDIGITSVGWAVVALEKDESGLKPVRIQDLGVRIFDKAEDSKTGASLALPRREARSARRRTRRRRHRLWRVKRLLEQHGILSMEQIEALYAQRTSSPDVYALRVAGLDRCLIAEEIARVLIHIAHRRGFQSNRKSEIKDSDAGKLLKAVQENENLMQSKGYRTVAEMLVSEATKTDAEGKLVHGKKHGYVSNVRNKAGEYRHTVSRQAIVDEVRKIFAAQRALGNDVMSEELEDSYLKILCSQRNFDDGPGGDSPYGHGSVSPDGVRQSIYERMVGSCTFETGEKRAPRSSYSFERFQLLTKVVNLRIYRQQEDGGRYPCELTQTERARVIDCAYEQTKITYGKLRKLLDMKDTESFAGLTYGLNRSRNKTEDTVFVEMKFYHEVRKALQRAGVFIQDLSIETLDQIGWILSVWKSDDNRRKKLSTLGLSDNVIEELLPLNGSKFGHLSLKAIRKILPFLEDGYSYDVACELAGYQFQGKTEYVKQRLLPPLGEGEVTNPVVRRALSQAIKVVNAVIRKHGSPESIHIELARELSKNLDERRKIEKAQKENQKNNEQIKDEIREILGSAHVTGRDIVKYKLFKQQQEFCMYSGEKLDVTRLFEPGYAEVDHIIPYGISFDDSYDNKVLVKTEQNRQKGNRTPLEYLRDKPEQKAKFIALVESIPLSQKKKNHLLMDKRAIDLEQEGFRERNLSDTRYITRALMNHIQAWLLFDETASTRSKRVVCVNGAVTAYMRARWGLTKDRDAGDKHHAADAVVVACIGDSLIQRVTKYDKFKRNALADRNRYVQQVSKSEGITQYVDKETGEVFTWESFDERKFLPNEPLEPWPFFRDELLARLSDDPSKNIRAIGLLTYSETEQIDPIFVSRMPTRKVTGAAHKETIRSPRIVKVDDNKGTEIQVVVSKVALTELKLTKDGEIKDYFRPEDDPRLYNTLRERLVQFGGDAKAAFKEPVYKISKDGSVRTPVRKVKIQEKLTLGVPVHGGRGIAENGGMVRIDVFAKGGKYYFVPIYVADVLKRELPNRLATAHKPYSEWRVVDDSYQFKFSLYPNDAVMIKPSREVDITYKDRKEPVGCRIMYFVSANIASASISLRTHDNSGELEGLGIQGLEVFEKYVVGPLGDTHPVYKERRMPFRVERKMN

SEQ ID NO: 342 - protein, 1442 aa, Caenispirillum salinarum
MPVLSPLSPNAAQGRRRWSLALDIGEGSIGWAVAEVDAEGRVLQLTGTGVTLFPSAWSNENGTYVAHGAADRAVRGQQQRHDSRRRRLAGLARLCAPVLERSPEDLKDLTRTPPKADPRAIFFLRADAARRPLDGPELFRVLHHMAAHRGIRLAELQEVDPPPESDADDAAPAATEDEDGTRRAAADERAFRRLMAEHMHRHGTQPTCGEIMAGRLRETPAGAQPVTRARDGLRVGGGVAVPTRALIEQEFDAIRAIQAPRHPDLPWDSLRRLVLDQAPIAVPPATPCLFLEELRRRGETFQGRTITREAIDRGLTVDPLIQALRIRETVGNLRLHERITEPDGRQRYVPRAMPELGLSHGELTAPERDTLVRALMHDPDGLAAKDGRIPYTRLRKLIGYDNSPVCFAQERDTSGGGITVNPTDPLMARWIDGWVDLPLKARSLYVRDVVARGADSAALARLLAEGAHGVPPVAAAAVPAATAAILESDIMQPGRYSVCPWAAEAILDAWANAPTEGFYDVTRGLFGFAPGEIVLEDLRRARGALLAHLPRTMAAARTPNRAAQQRGPLPAYESVIPSQLITSLRRAHKGRAADWSAADPEERNPFLRTWTGNAATDHILNQVRKTANEVITKYGNRRGWDPLPSRITVELAREAKHGVIRRNEIAKENRENEGRRKKESAALDTFCQDNTVSWQAGGLPKERAALRLRLAQRQEFFCPYCAERPKLRATDLFSPAETEIDHVIERRMGGDGPDNLVLAHKDCNNAKGKKTPHEHAGDLLDSPALAALWQGWRKENADRLKGKGHKARTPREDKDFMDRVGWRFEEDARAKAEENQERRGRRMLHDTARATRLARLYLAAAVMPEDPAEIGAPPVETPPSPEDPTGYTAIYRTISRVQPVNGSVTHMLRQRLLQRDKNRDYQTHHAEDACLLLLAGPAVVQAFNTEAAQHGADAPDDRPVDLMPTSDAYHQQRRARALGRVPLATVDAALADIVMPESDRQDPETGRVHWRLTRAGRGLKRRIDDLTRNCVILSRPRRPSETGTPGALHNATHYGRREITVDGRTDTVVTQRMNARDLVALLDNAKIVPAARLDAAAPGDTILKEICTEIADRHDRVVDPEGTHARRWISARLAALVPAHAEAVARDIAELADLDALADADRTPEQEARRSALRQSPYLGRAISAKKADGRARAREQEILTRALLDPHWGPRGLRHLIMREARAPSLVRIRANKTDAFGRPVPDAAVWVKTDGNAVSQLWRLTSVVTDDGRRIPLPKPIEKRIEISNLEYARLNGLDEGAGVTGNNAPPRPLRQDIDRLTPLWRDHGTAPGGYLGTAVGELEDKARSALRGKAMRQTLTDAGITAEAGWRLDSEGAVCDLEVAKGDTVKKDGKTYKVGVITQGIFGMPVDAAGSAPRTPEDCEKFEEQYGIKPWKAKGIPLA

SEQ ID NO: 343 - protein, 1114 aa, Eubacterium rectale
MNYTEKEKLFMKYILALDIGIASVGWAILDKESETVIEAGSNIFPEASAADNQLRRDMRGAKRNNRRLKTRINDFIKLWENNNLSIPQFKSTEIVGLKVRAITEEITLDELYLILYSYLKHRGISYLEDALDDTVSGSSAYANGLKLNAKELETHYPCEIQQERLNTIGKYRGQSQIINENGEVLDLSNVFTIGAYRKEIQRVFEIQKKYHPELTDEFCDGYMLIFNRKRKYYEGPGNEKSRTDYGRFTTKLDANGNYITEDNIFEKLIGKCSVYPDELRAAAASYTAQEYNVLNDLNNLTINGRKLEENEKHEIVERIKSSNTINMRKIISDCMGENIDDFAGARIDKSGKEIFHKFEVYNKMRKALLEIGIDISNYSREELDEIGYIMTINTDKEAMMEAFQKSWIDLSDDVKQCLINMRKTNGALFNKWQSFSLKIMNELIPEMYAQPKEQMTLLTEMGVTKGTQEEFAGLKYIPVDVVSEDIFNPVVRRSVRISFKILNAVLKKYKALDTIVIEMPRDRNSEEQKKRINDSQKLNEKEMEYIEKKLAVTYGIKLSPSDFSSQKQLSLKLKLWNEQDGICLYSGKTIDPNDIINNPQLFEIDHIIPRSISFDDARSNKVLVYRSENQKKGNQTPYYYLTHSHSEWSFEQYKATVMNLSKKKEYAISRKKIQNLLYSEDITKMDVLKGFINRNINDTSYASRLVLNTIQNFFMANEADTKVKVIKGSYTHQMRCNLKLDKNRDESYSHHAVDAMLIGYSELGYEAYHKLQGEFIDFETGEILRKDMWDENMSDEVYADYLYGKKWANIRNEVVKAEKNVKYWHYVMRKSNRGLCNQTIRGTREYDGKQYKINKLDIRTKEGIKVFAKLAFSKKDSDRERLLVYLNDRRTFDDLCKIYEDYSDAANPFVQYEKETGDIIRKYSKKHNGPRIDKLKYKDGEVGACIDISHKYGFEKGSKKVILESLVPYRMDVYYKEENHSYYLVGVKQSDIKFEKGRNVIDEEAYARILVNEKMIQPGQSRADLENLGFKFKLSFYKNDIIEYEKDGKIYTERLVSRTMPKQRNYIETKPIDKAKFEKQNLVGLGKTKFIKKYRYDILGNKYSCSEEKFTSFC

SEQ ID NO: 344 - protein, 1314 aa, Mycoplasma synoviae
MLRLYCANNLVLNNVQNLWKYLLLLIFDKKIIFLFKIKVILIRRYMENNNKEKIVIGFDLGVASVGWSIVNAETKEVIDLGVRLFSEPEKADYRRAKRTTRRLLRRKKFKREKFHKLILKNAEIFGLQSRNEILNVYKDQSSKYRNILKLKINALKEEIKPSELVWILRDYLQNRGYFYKNEKLTDEFVSNSFPSKKLHEHYEKYGFFRGSVKLDNKLDNKKDKAKEKDEEEESDAKKESEELIFSNKQWINEIVKVFENQSYLTESFKEEYLKLFNYVRPFNKGPGSKNSRTAYGVFSTDIDPETNKFKDYSNIWDKTIGKCSLFEEEIRAPKNLPSALIFNLQNEICTIKNEFTEFKNWWLNAEQKSEILKFVFTELFNWKDKKYSDKKFNKNLQDKIKKYLLNFALENFNLNEEILKNRDLENDTVLGLKGVKYYEKSNATADAALEFSSLKPLYVFIKFLKEKKLDLNYLLGLENTEILYFLDSIYLAISYSSDLKERNEWFKKLLKELYPKIKNNNLEIIENVEDIFEITDQEKFESFSKTHSLSREAFNHIIPLLLSNNEGKNYESLKHSNEELKKRTEKAELKAQQNQKYLKDNFLKEALVPLSVKTSVLQAIKIFNQIIKNFGKKYEISQVVIEMARELTKPNLEKLLNNATNSNIKILKEKLDQTEKFDDFTKKKFIDKIENSVVFRNKLFLWFEQDRKDPYTQLDIKINEIEDETEIDHVIPYSKSADDSWFNKLLVKKSTNQLKKNKTVWEYYQNESDPEAKWNKFVAWAKRIYLVQKSDKESKDNSEKNSIFKNKKPNLKFKNITKKLFDPYKDLGFLARNLNDTRYATKVFRDQLNNYSKHHSKDDENKLFKVVCMNGSITSFLRKSMWRKNEEQVYRFNFWKKDRDQFFHHAVDASIIAIFSLLTKTLYNKLRVYESYDVQRREDGVYLINKETGEVKKADKDYWKDQHNFLKIRENAIEIKNVLNNVDFQNQVRYSRKANTKLNTQLFNETLYGVKEFENNFYKLEKVNLFSRKDLRKFILEDLNEESEKNKKNENGSRKRILTEKYIVDEILQILENEEFKDSKSDINALNKYMDSLPSKFSEFFSQDFINKCKKENSLILTFDAIKHNDPKKVIKIKNLKFFREDATLKNKQAVHKDSKNQIKSFYESYKCVGFIWLKNKNDLEESIFVPINSRVIHFGDKDKDIFDFDSYNKEKLLNEINLKRPENKKFNSINEIEFVKFVKPGALLLNFENQQIYYISTLESSSLRAKIKLLNKMDKGKAVSMKKITNPDEYKIIEHVNPLGINLNWTKKLENNN

SEQ ID NO: 345 - protein, 1197 aa, Porphyromonas sp.
MLMSKHVLGLDLGVGSIGWCLIALDAQGDPAEILGMGSRVVPLNNATKAIEAFNAGAAFTASQERTARRTMRRGFARYQLRRYRLRRELEKVGMLPDAALIQLPLLELWELRERAATAGRRLTLPELGRVLCHINQKRGYRHVKSDAAAIVGDEGEKKKDSNSAYLAGIRANDEKLQAEHKTVGQYFAEQLRQNQSESPTGGISYRIKDQIFSRQCYIDEYDQIMAVQRVHYPDILTDEFIRMLRDEVIFMQRPLKSCKHLVSLCEFEKQERVMRVQQDDGKGGWQLVERRVKFGPKVAPKSSPLFQLCCIYEAVNNIRLTRPNGSPCDITPEERAKIVAHLQSSASLSFAALKKLLKEKALIADQLTSKSGLKGNSTRVALASALQPYPQYHHLLDMELETRMMTVQLTDEETGEVTEREVAVVTDSYVRKPLYRLWHILYSIEEREAMRRALITQLGMKEEDLDGGLLDQLYRLDFVKPGYGNKSAKFICKLLPQLQQGLGYSEACAAVGYRHSNSPTSEEITERTLLEKIPLLQRNELRQPLVEKILNQMINLVNALKAEYGIDEVRVELARELKMSREERERMARNNKDREERNKGVAAKIRECGLYPTKPRIQKYMLWKEAGRQCLYCGRSIEEEQCLREGGMEVEHIIPKSVLYDDSYGNKTCACRRCNKEKGNRTALEYIRAKGREAEYMKRINDLLKEKKISYSKHQRLRWLKEDIPSDFLERQLRLTQYISRQAMAILQQGIRRVSASEGGVTARLRSLWGYGKILHTLNLDRYDSMGETERVSREGEATEELHITNWSKRMDHRHHAIDALVVACTRQSYIQRLNRLSSEFGREDKKKEDQEAQEQQATETGRLSNLERWLTQRPHFSVRTVSDKVAEILISYRPGQRVVTRGRNIYRKKMADGREVSCVQRGVLVPRGELMEASFYGKILSQGRVRIVKRYPLHDLKGEVVDPHLRELITTYNQELKSREKGAPIPPLCLDKDKKQEVRSVRCYAKTLSLDKAIPMCFDEKGEPTAFVKSASNHHLALYRTPKGKLVESIVTFWDAVDRARYGIPLVITHPREVMEQVLQRGDIPEQVLSLLPPSDWVFVDSLQQDEMVVIGLSDEELQRALEAQNYRKISEHLYRVQKMSSSYYVFRYHLETSVADDKNTSGRIPKFHRVQSLKAYEERNIRKVRVDLLGRISLL

SEQ ID NO: 346 - protein, 1121 aa, Streptococcus thermophilus
MSDLVLGLDIGIGSVGVGILNKVTGEIIHKNSRIFPAAQAENNLVRRTNRQGRRLARRKKHRRVRLNRLFEESGLITDFTKISINLNPYQLRVKGLTDELSNEELFIALKNMVKHRGISYLDDASDDGNSSVGDYAQIVKENSKQLETKTPGQIQLERYQTYGQLRGDFTVEKDGKKHRLINVFPTSAYRSEALRILQTQQEFNPQITDEFINRYLEILTGKRKYYHGPGNEKSRTDYGRYRTSGETLDNIFGILIGKCTFYPDEFRAAKASYTAQEFNLLNDLNNLTVPTETKKLSKEQKNQIINYVKNEKAMGPAKLFKYIAKLLSCDVADIKGYRIDKSGKAEIHTFEAYRKMKTLETLDIEQMDRETLDKLAYVLTLNTEREGIQEALEHEFADGSFSQKQVDELVQFRKANSSIFGKGWHNFSVKLMMELIPELYETSEEQMTILTRLGKQKTTSSSNKTKYIDEKLLTEEIYNPVVAKSVRQAIKIVNAAIKEYGDFDNIVIEMARETNEDDEKKAIQKIQKANKDEKDAAMLKAANQYNGKAELPHSVFHGHKQLATKIRLWHQQGERCLYTGKTISIHDLINNSNQFEVDHILPLSITFDDSLANKVLVYATANQEKGQRTPYQALDSMDDAWSFRELKAFVRESKTLSNKKKEYLLTEEDISKFDVRKKFIERNLVDTRYASRVVLNALQEHFRAHKIDTKVSVVRGQFTSQLRRHWGIEKTRDTYHHHAVDALIIAASSQLNLWKKQKNTLVSYSEDQLLDIETGELISDDEYKESVFKAPYQHFVDTLKSKEFEDSILFSYQVDSKFNRKISDATIYATRQAKVGKDKADETYVLGKIKDIYTQDGYDAFMKIYKKDKSKFLMYRHDPQTFEKVIEPILENYPNKQINEKGKEVPCNPFLKYKEEHGYIRKYSKKGNGPEIKSLKYYDSKLGNHIDITPKDSNNKVVLQSVSPWRADVYFNKTTGKYEILGLKYADLQFEKGTGTYKISQEKYNDIKKKEGVDSDSEFKFTLYKNDLLLVKDTETKEQQLFRFLSRTMPKQKHYVELKPYDKQKFEGGEALIKVLGNVANSGQCKKGLGKSNISIYKVRTDVLGNQHIIKNEGDKPKLDF

SEQ ID NO: 347 - protein, 1152 aa, Roseburia inulinivorans
MNAEHGKEGLLIMEENFQYRIGLDIGITSVGWAVLQNNSQDEPVRITDLGVRIFDVAENPKNGDALAAPRRDARTTRRRLRRRRHRLERIKFLLQENGLIEMDSFMERYYKGNLPDVYQLRYEGLDRKLKDEELAQVLIHIAKHRGFRSTRKAETKEKEGGAVLKATTENQKIMQEKGYRTVGEMLYLDEAFHTECLWNEKGYVLTPRNRPDDYKHTILRSMLVEEVHAIFAAQRAHGNQKATEGLEEAYVEIMTSQRSFDMGPGLQPDGKPSPYAMEGFGDRVGKCTFEKDEYRAPKATYTAELFVALQKINHTKLIDEFGTGRFFSEEERKTIIGLLLSSKELKYGTIRKKLNIDPSLKFNSLNYSAKKEGETEEERVLDTEKAKFASMFWTYEYSKCLKDRTEEMPVGEKADLFDRIGEILTAYKNDDSRSSRLKELGLSGEEIDGLLDLSPAKYQRVSLKAMRKMQPYLEDGLIYDKACEAAGYDFRALNDGNKKHLLKGEEINAIVNDITNPVVKRSVSQTIKVINAIIQKYGSPQAVNIELAREMSKNFQDRTNLEKEMKKRQQENERAKQQIIELGKQNPTGQDILKYRLWNDQGGYCLYSGKKIPLEELFDGGYDIDHILPYSITFDDSYRNKVLVTAQENRQKGNRTPYEYFGADEKRWEDYEASVRLLVRDYKKQQKLLKKNFTEEERKEFKERNLNDTKYITRVVYNMIRQNLELEPFNHPEKKKQVWAVNGAVTSYLRKRWGLMQKDRSTDRHHAMDAVVIACCTDGMIHKISRYMQGRELAYSRNFKFPDEETGEILNRDNFTREQWDEKFGVKVPLPWNSFRDELDIRLLNEDPKNFLLTHADVQRELDYPGWMYGEEESPIEEGRYINYIRPLFVSRMPNHKVTGSAHDATIRSARDYETRGVVITKVPLTDLKLNKDNEIEGYYDKDSDRLLYQALVRQLLLHGNDGKKAFAEDFHKPKADGTEGPVVRKVKIEKKQTSGVMVRGGTGIAANGEMVRIDVFRENGKYYFVPVYTADVVRKVLPNRAATHTKPYSEWRVMDDANFVFSLYSRDLIHVKSKKDIKTNLVNGGLLLQKEIFAYYTGADIATASIAGFANDSNFKFRGLGIQSLEIFEKCQVDILGNISVVRHENRQEFH

SEQ ID NO: 348 - protein, 1082 aa, Methylosinus trichosporium
MRVLGLDAGIASLGWALIEIEESNRGELSQGTIIGAGTWMFDAPEEKTQAGAKLKSEQRRTFRGQRRVVRRRRQRMNEVRRILHSHGLLPSSDRDALKQPGLDPWRIRAEALDRLLGPVELAVALGHIARHRGFKSNSKGAKTNDPADDTSKMKRAVNETREKLARFGSAAKMLVEDESFVLRQTPTKNGASEIVRRFRNREGDYSRSLLRDDLAAEMRALFTAQARFQSAIATADLQTAFTKAAFFQRPLQDSEKLVGPCPFEVDEKRAPKRGYSFELFRFLSRLNHVTLRDGKQERTLTRDELALAAADFGAAAKVSFTALRKKLKLPETTVFVGVKADEESKLDVVARSGKAAEGTARLRSVIVDALGELAWGALLCSPEKLDKIAEVISFRSDIGRISEGLAQAGCNAPLVDALTAAASDGRFDPFTGAGHISSKAARNILSGLRQGMTYDKACCAADYDHTASRERGAFDVGGHGREALKRILQEERISRELVGSPTARKALIESIKQVKAIVERYGVPDRIHVELARDVGKSIEEREEITRGIEKRNRQKDKLRGLFEKEVGRPPQDGARGKEELLRFELWSEQMGRCLYTDDYISPSQLVATDDAVQVDHILPWSRFADDSYANKTLCMAKANQDKKGRTPYEWFKAEKTDTEWDAFIVRVEALADMKGFKKRNYKLRNAEEAAAKFRNRNLNDTRWACRLLAEALKQLYPKGEKDKDGKERRRVFSRPGALTDRLRRAWGLQWMKKSTKGDRIPDDRHHALDAIVIAATTESLLQRATREVQEIEDKGLHYDLVKNVTPPWPGFREQAVEAVEKVFVARAERRRARGKAHDATIRHIAVREGEQRVYERRKVAELKLADLDRVKDAERNARLIEKLRNWIEAGSPKDDPPLSPKGDPIFKVRLVTKSKVNIALDTGNPKRPGTVDRGEMARVDVFRKASKKGKYEYYLVPIYPHDIATMKTPPIRAVQAYKPEDEWPEMDSSYEFCWSLVPMTYLQVISSKGEIFEGYYRGMNRSVGAIQLSAHSNSSDVVQGIGARTLTEFKKFNVDRFGRKHEVERELRTWRGETWRGKAYI

SEQ ID NO: 349 - protein, 1156 aa, Ruminococcus albus
MGNYYLGLDVGIGSIGWAVINIEKKRIEDFNVRIFKSGEIQEKNRNSRASQQCRRSRGLRRLYRRKSHRKLRLKNYLSIIGLTTSEKIDYYYETADNNVIQLRNKGLSEKLTPEEIAACLIHICNNRGYKDFYEVNVEDIEDPDERNEYKEEHDSIVLISNLMNEGGYCTPAEMICNCREFDEPNSVYRKFHNSAASKNHYLITRHMLVKEVDLILENQSKYYGILDDKTIAKIKDIIFAQRDFEIGPGKNERFRRFTGYLDSIGKCQFFKDQERGSRFTVIADIYAFVNVLSQYTYTNNRGESVFDTSFANDLINSALKNGSMDKRELKAIAKSYHIDISDKNSDTSLTKCFKYIKVVKPLFEKYGYDWDKLIENYTDTDNNVLNRIGIVLSQAQTPKRRREKLKALNIGLDDGLINELTKLKLSGTANVSYKYMQGSIEAFCEGDLYGKYQAKFNKEIPDIDENAKPQKLPPFKNEDDCEFFKNPVVFRSINETRKLINAIIDKYGYPAAVNIETADELNKTFEDRAIDTKRNNDNQKENDRIVKEIIECIKCDEVHARHLIEKYKLWEAQEGKCLYSGETITKEDMLRDKDKLFEVDHIVPYSLILDNTINNKALVYAEENQKKGQRTPLMYMNEAQAADYRVRVNTMFKSKKCSKKKYQYLMLPDLNDQELLGGWRSRNLNDTRYICKYLVNYLRKNLRFDRSYESSDEDDLKIRDHYRVFPVKSRFTSMFRRWWLNEKTWGRYDKAELKKLTYLDHAADAIIIANCRPEYVVLAGEKLKLNKMYHQAGKRITPEYEQSKKACIDNLYKLFRMDRRTAEKLLSGHGRLTPIIPNLSEEVDKRLWDKNIYEQFWKDDKDKKSCEELYRENVASLYKGDPKFASSLSMPVISLKPDHKYRGTITGEEAIRVKEIDGKLIKLKRKSISEITAESINSIYTDDKILIDSLKTIFEQADYKDVGDYLKKTNQHFFTTSSGKRVNKVTVIEKVPSRWLRKEIDDNNFSLLNDSSYYCIELYKDSKGDNNLQGIAMSDIVHDRKTKKLYLKPDFNYPDDYYTHVMYIFPGDYLRIKSTSKKSGEQLKFEGYFISVKNVNENSFRFISDNKPCAKDKRVSITKKDIVIKLAVDLMGKVQGENNGKGISCGEPLSLLKEKN

SEQ ID NO: 350 - protein, 1187 aa, Bifidobacterium longum
MLSRQLLGASHLARPVSYSYNVQDNDVHCSYGERCFMRGKRYRIGIDVGLNSVGLAAVEVSDENSPVRLLNAQSVIHDGGVDPQKNKEAITRKNMSGVARRTRRMRRRKRERLHKLDMLLGKFGYPVIEPESLDKPFEEWHVRAELATRYIEDDELRRESISIALRHMARHRGWRNPYRQVDSLISDNPYSKQYGELKEKAKAYNDDATAAEEESTPAQLVVAMLDAGYAEAPRLRWRTGSKKPDAEGYLPVRLMQEDNANELKQIFRVQRVPADEWKPLFRSVFYAVSPKGSAEQRVGQDPLAPEQARALKASLAFQEYRIANVITNLRIKDASAELRKLTVDEKQSIYDQLVSPSSEDITWSDLCDFLGFKRSQLKGVGSLTEDGEERISSRPPRLTSVQRIYESDNKIRKPLVAWWKSASDNEHEAMIRLLSNTVDIDKVREDVAYASAIEFIDGLDDDALTKLDSVDLPSGRAAYSVETLQKLTRQMLTTDDDLHEARKTLFNVTDSWRPPADPIGEPLGNPSVDRVLKNVNRYLMNCQQRWGNPVSVNIEHVRSSFSSVAFARKDKREYEKNNEKRSIFRSSLSEQLRADEQMEKVRESDLRRLEAIQRQNGQCLYCGRTITFRTCEMDHIVPRKGVGSTNTRTNFAAVCAECNRMKSNTPFAIWARSEDAQTRGVSLAEAKKRVTMFTFNPKSYAPREVKAFKQAVIARLQQTEDDAAIDNRSIESVAWMADELHRRIDWYFNAKQYVNSASIDDAEAETMKTTVSVFQGRVTASARRAAGIEGKIHFIGQQSKTRLDRRHHAVDASVIAMMNTAAAQTLMERESLRESQRLIGLMPGERSWKEYPYEGTSRYESFHLWLDNMDVLLELLNDALDNDRIAVMQSQRYVLGNSIAHDATIHPLEKVPLGSAMSADLIRRASTPALWCALTRLPDYDEKEGLPEDSHREIRVHDTRYSADDEMGFFASQAAQIAVQEGSADIGSAIHHARVYRCWKTNAKGVRKYFYGMIRVFQTDLLRACHDDLFTVPLPPQSISMRYGEPRVVQALQSGNAQYLGSLVVGDEIEMDFSSLDVDGQIGEYLQFFSQFSGGNLAWKHWVVDGFFNQTQLRIRPRYLAAEGLAKAFSDDVVPDGVQKIVTKQGWLPPVNTASKTAVRIVRRNAFGEPRLSSAHHMPCSWQWRHE

SEQ ID NO: 351 - protein, 1150 aa, Enterococcus faecalis
MYSIGLDLGISSVGWSVIDERTGNVIDLGVRLFSAKNSEKNLERRTNRGGRRLIRRKTNRLKDAKKILAAVGFYEDKSLKNSCPYQLRVKGLTEPLSRGEIYKVTLHILKKRGISYLDEVDTEAAKESQDYKEQVRKNAQLLTKYTPGQIQLQRLKENNRVKTGINAQGNYQLNVFKVSAYANELATILKTQQAFYPNELTDDWIALFVQPGIAEEAGLIYRKRPYYHGPGNEANNSPYGRWSDFQKTGEPATNIFDKLIGKDFQGELRASGLSLSAQQYNLLNDLTNLKIDGEVPLSSEQKEYILTELMTKEFTRFGVNDVVKLLGVKKERLSGWRLDKKGKPEIHTLKGYRNWRKIFAEAGIDLATLPTETIDCLAKVLTLNTEREGIENTLAFELPELSESVKLLVLDRYKELSQSISTQSWHRFSLKTLHLLIPELMNATSEQNTLLEQFQLKSDVRKRYSEYKKLPTKDVLAEIYNPTVNKTVSQAFKVIDALLVKYGKEQIRYITIEMPRDDNEEDEKKRIKELHAKNSQRKNDSQSYFMQKSGWSQEKFQTTIQKNRRFLAKLLYYYEQDGICAYTGLPISPELLVSDSTEIDHIIPISISLDDSINNKVLVLSKANQVKGQQTPYDAWMDGSFKKINGKFSNWDDYQKWVESRHFSHKKENNLLETRNIFDSEQVEKFLARNLNDTRYASRLVLNTLQSFFTNQETKVRVVNGSFTHTLRKKWGADLDKTRETHHHHAVDATLCAVTSFVKVSRYHYAVKEETGEKVMREIDFETGEIVNEMSYWEFKKSKKYERKTYQVKWPNFREQLKPVNLHPRIKFSHQVDRKANRKLSDATIYSVREKTEVKTLKSGKQKITTDEYTIGKIKDIYTLDGWEAFKKKQDKLLMKDLDEKTYERLLSIAETTPDFQEVEEKNGKVKRVKRSPFAVYCEENDIPAIQKYAKKNNGPLIRSLKYYDGKLNKHINITKDSQGRPVEKTKNGRKVTLQSLKPYRYDIYQDLETKAYYTVQLYYSDLRFVEGKYGITEKEYMKKVAEQTKGQVVRFCFSLQKNDGLEIEWKDSQRYDVRFYNFQSANSINFKGLEQEMMPAENQFKQKPYNNGAINLNIAKYGKEGKKLRKFNTDILGKKHYLFYEKEPKNIIK

SEQ ID NO: 352 - protein, 1236 aa, Mycoplasma mobile
MYFYKNKENKLNKKVVLGLDLGIASVGWCLTDISQKEDNKFPIILHGVRLFETVDDSDDKLLNETRRKKRGQRRRNRRLFTRKRDFIKYLIDNNIIELEFDKNPKILVRNFIEKYINPFSKNLELKYKSVTNLPIGFHNLRKAAINEKYKLDKSELIVLLYFYLSLRGAFFDNPEDTKSKEMNKNEIEIFDKNESIKNAEFPIDKIIEFYKISGKIRSTINLKFGHQDYLKEIKQVFEKQNIDFMNYEKFAMEEKSFFSRIRNYSEGPGNEKSFSKYGLYANENGNPELIINEKGQKIYTKIFKTLWESKIGKCSYDKKLYRAPKNSFSAKVFDITNKLTDWKHKNEYISERLKRKILLSRFLNKDSKSAVEKILKEENIKFENLSEIAYNKDDNKINLPIINAYHSLTTIFKKHLINFENYLISNENDLSKLMSFYKQQSEKLFVPNEKGSYEINQNNNVLHIFDAISNILNKFSTIQDRIRILEGYFEFSNLKKDVKSSEIYSEIAKLREFSGTSSLSFGAYYKFIPNLISEGSKNYSTISYEEKALQNQKNNFSHSNLFEKTWVEDLIASPTVKRSLRQTMNLLKEIFKYSEKNNLEIEKIVVEVTRSSNNKHERKKIEGINKYRKEKYEELKKVYDLPNENTTLLKKLWLLRQQQGYDAYSLRKIEANDVINKPWNYDIDHIVPRSISFDDSFSNLVIVNKLDNAKKSNDLSAKQFIEKIYGIEKLKEAKENWGNWYLRNANGKAFNDKGKFIKLYTIDNLDEFDNSDFINRNLSDTSYITNALVNHLTFSNSKYKYSVVSVNGKQTSNLRNQIAFVGIKNNKETEREWKRPEGFKSINSNDFLIREEGKNDVKDDVLIKDRSFNGHHAEDAYFITIISQYFRSFKRIERLNVNYRKETRELDDLEKNNIKFKEKASFDNFLLINALDELNEKLNQMRFSRMVITKKNTQLFNETLYSGKYDKGKNTIKKVEKLNLLDNRTDKIKKIEEFFDEDKLKENELTKLHIFNHDKNLYETLKIIWNEVKIEIKNKNLNEKNYFKYFVNKKLQEGKISFNEWVPILDNDFKIIRKIRYIKFSSEEKETDEIIFSQSNFLKIDQRQNFSFHNTLYWVQIWVYKNQKDQYCFISIDARNSKFEKDEIKINYEKLKTQKEKLQIINEEPILKINKGDLFENEEKELFYIVGRDEKPQKLEIKYILGKKIKDQKQIQKPVKKYFPNWKKVNLTYMGEIFKK

SEQ ID NO: 353 - protein, 1105 aa, Actinomyces coleocanis
MDNKNYRIGIDVGLNSIGFCAVEVDQHDTPLGFLNLSVYRHDAGIDPNGKKTNTTRLAMSGVARRTRRLFRKRKRRLAALDRFIEAQGWTLPDHADYKDPYTPWLVRAELAQTPIRDENDLHEKLAIAVRHIARHRGWRSPWVPVRSLHVEQPPSDQYLALKERVEAKTLLQMPEGATPAEMVVALDLSVDVNLRPKNREKTDTRPENKKPGFLGGKLMQSDNANELRKIAKIQGLDDALLRELIELVFAADSPKGASGELVGYDVLPGQHGKRRAEKAHPAFQRYRIASIVSNLRIRHLGSGADERLDVETQKRVFEYLLNAKPTADITWSDVAEEIGVERNLLMGTATQTADGERASAKPPVDVTNVAFATCKIKPLKEWWLNADYEARCVMVSALSHAEKLTEGTAAEVEVAEFLQNLSDEDNEKLDSFSLPIGRAAYSVDSLERLTKRMIENGEDLFEARVNEFGVSEDWRPPAEPIGARVGNPAVDRVLKAVNRYLMAAEAEWGAPLSVNIEHVREGFISKRQAVEIDRENQKRYQRNQAVRSQIADHINATSGVRGSDVTRYLAIQRQNGECLYCGTAITFVNSEMDHIVPRAGLGSTNTRDNLVATCERCNKSKSNKPFAVWAAECGIPGVSVAEALKRVDFWIADGFASSKEHRELQKGVKDRLKRKVSDPEIDNRSMESVAWMARELAHRVQYYFDEKHTGTKVRVFRGSLTSAARKASGFESRVNFIGGNGKTRLDRRHHAMDAATVAMLRNSVAKTLVLRGNIRASERAIGAAETWKSFRGENVADRQIFESWSENMRVLVEKFNLALYNDEVSIFSSLRLQLGNGKAHDDTITKLQMHKVGDAWSLTEIDRASTPALWCALTRQPDFTWKDGLPANEDRTIIVNGTHYGPLDKVGIFGKAAASLLVRGGSVDIGSAIHHARIYRIAGKKPTYGMVRVFAPDLLRYRNEDLFNVELPPQSVSMRYAEPKVREAIREGKAEYLGWLVVGDELLLDLSSETSGQIAELQQDFPGTTHWTVAGFFSPSRLRLRPVYLAQEGLGEDVSEGSKSIIAGQGWRPAVNKVFGSAMPEVIRRDGLGRKRRFSYSGLPVSWQG

SEQ ID NO: 354 - protein, 1079 aa, Dinoroseobacter shibae
MRLGLDIGTSSIGWWLYETDGAGSDARITGVVDGGVRIFSDGRDPKSGASLAVDRRAARAMRRRRDRYLRRRATLMKVLAETGLMPADPAEAKALEALDPFALRAAGLDEPLPLPHLGRALFHLNQRRGFKSNRKTDRGDNESGKIKDATARLDMEMMANGARTYGEFLHKRRQKATDPRHVPSVRTRLSIANRGGPDGKEEAGYDFYPDRRHLEEEFHKLWAAQGAHHPELTETLRDLLFEKIFFQRPLKEPEVGLCLFSGHHGVPPKDPRLPKAHPLTQRRVLYETVNQLRVTADGREARPLTREERDQVIHALDNKKPTKSLSSMVLKLPALAKVLKLRDGERFTLETGVRDAIACDPLRASPAHPDRFGPRWSILDADAQWEVISRIRRVQSDAEHAALVDWLTEAHGLDRAHAEATAHAPLPDGYGRLGLTATTRILYQLTADVVTYADAVKACGWHHSDGRTGECFDRLPYYGEVLERHVIPGSYHPDDDDITRFGRITNPTVHIGLNQLRRLVNRIIETHGKPHQIVVELARDLKKSEEQKRADIKRIRDTTEAAKKRSEKLEELEIEDNGRNRMLLRLWEDLNPDDAMRRFCPYTGTRISAAMIFDGSCDVDHILPYSRTLDDSFPNRTLCLREANRQKRNQTPWQAWGDTPHWHAIAANLKNLPENKRWRFAPDAMTRFEGENGFLDRALKDTQYLARISRSYLDTLFTKGGHVWVVPGRFTEMLRRHWGLNSLLSDAGRGAVKAKNRTDHRHHAIDAAVIAATDPGLLNRISRAAGQGEAAGQSAELIARDTPPPWEGFRDDLRVRLDRIIVSHRADHGRIDHAARKQGRDSTAGQLHQETAYSIVDDIHVASRTDLLSLKPAQLLDEPGRSGQVRDPQLRKALRVATGGKTGKDFENALRYFASKPGPYQAIRRVRIIKPLQAQARVPVPAQDPIKAYQGGSNHLFEIWRLPDGEIEAQVITSFEAHTLEGEKRPHPAAKRLLRVHKGDMVALERDGRRVVGHVQKMDIANGLFIVPHNEANADTRNNDKSDPFKWIQIGARPAIASGIRRVSVDEIGRLRDGGTRPI

SEQ ID NO: 355 - protein, 1181 aa, Actinomyces sp.
MLHCIAVIRVPPSEEPGFFETHADSCALCHHGCMTYAANDKAIRYRVGIDVGLRSIGFCAVEVDDEDHPIRILNSVVHVHDAGTGGPGETESLRKRSGVAARARRRGRAEKQRLKKLDVLLEELGWGVSSNELLDSHAPWHIRKRLVSEYIEDETERRQCLSVAMAHIARHRGWRNSFSKVDTLLLEQAPSDRMQGLKERVEDRTGLQFSEEVTQGELVATLLEHDGDVTIRGFVRKGGKATKVHGVLEGKYMQSDLVAELRQICRTQRVSETTFEKLVLSIFHSKEPAPSAARQRERVGLDELQLALDPAAKQPRAERAHPAFQKFKVVATLANMRIREQSAGERSLTSEELNRVARYLLNHTESESPTWDDVARKLEVPRHRLRGSSRASLETGGGLTYPPVDDTTVRVMSAEVDWLADWWDCANDESRGHMIDAISNGCGSEPDDVEDEEVNELISSATAEDMLKLELLAKKLPSGRVAYSLKTLREVTAAILETGDDLSQAITRLYGVDPGWVPTPAPIEAPVGNPSVDRVLKQVARWLKFASKRWGVPQTVNIEHTREGLKSASLLEEERERWERFEARREIRQKEMYKRLGISGPFRRSDQVRYEILDLQDCACLYCGNEINFQTFEVDHIIPRVDASSDSRRTNLAAVCHSCNSAKGGLAFGQWVKRGDCPSGVSLENAIKRVRSWSKDRLGLTEKAMGKRKSEVISRLKTEMPYEEFDGRSMESVAWMAIELKKRIEGYFNSDRPEGCAAVQVNAYSGRLTACARRAAHVDKRVRLIRLKGDDGHHKNRFDRRNHAMDALVIALMTPAIARTIAVREDRREAQQLTRAFESWKNFLGSEERMQDRWESWIGDVEYACDRLNELIDADKIPVTENLRLRNSGKLHADQPESLKKARRGSKRPRPQRYVLGDALPADVINRVTDPGLWTALVRAPGFDSQLGLPADLNRGLKLRGKRISADFPIDYFPTDSPALAVQGGYVGLEFHHARLYRIIGPKEKVKYALLRVCAIDLCGIDCDDLFEVELKPSSISMRTADAKLKEAMGNGSAKQIGWLVLGDEIQIDPTKFPKQSIGKFLKECGPVSSWRVSALDTPSKITLKPRLLSNEPLLKTSRVGGHESDLVVAECVEKIMKKTGWVVEINALCQSGLIRVIRRNALGEVRTSPKSGLPISLNLR

SEQ ID NO: 356 - protein, 1113 aa, Alcanivorax sp.
MRYRVGLDLGTASVGAAVFSMDEQGNPMELIWHYERLFSEPLVPDMGQLKPKKAARRLARQQRRQIDRRASRLRRIAIVSRRLGIAPGRNDSGVHGNDVPTLRAMAVNERIELGQLRAVLLRMGKKRGYGGTFKAVRKVGEAGEVASGASRLEEEMVALASVQNKDSVTVGEYLAARVEHGLPSKLKVAANNEYYAPEYALFRQYLGLPAIKGRPDCLPNMYALRHQIEHEFERIWATQSQFHDVMKDHGVKEEIRNAIFFQRPLKSPADKVGRCSLQTNLPRAPRAQIAAQNFRIEKQMADLRWGMGRRAEMLNDHQKAVIRELLNQQKELSFRKIYKELERAGCPGPEGKGLNMDRAALGGRDDLSGNTTLAAWRKLGLEDRWQELDEVTQIQVINFLADLGSPEQLDTDDWSCRFMGKNGRPRNFSDEFVAFMNELRMTDGFDRLSKMGFEGGRSSYSIKALKALTEWMIAPHWRETPETHRVDEEAAIRECYPESLATPAQGGRQSKLEPPPLTGNEVVDVALRQVRHTINMMIDDLGSVPAQIVVEMAREMKGGVTRRNDIEKQNKRFASERKKAAQSIEENGKTPTPARILRYQLWIEQGHQCPYCESNISLEQALSGAYTNFEHILPRTLTQIGRKRSELVLAHRECNDEKGNRTPYQAFGHDDRRWRIVEQRANALPKKSSRKTRLLLLKDFEGEALTDESIDEFADRQLHESSWLAKVTTQWLSSLGSDVYVSRGSLTAELRRRWGLDTVIPQVRFESGMPVVDEEGAEITPEEFEKFRLQWEGHRVTREMRTDRRPDKRIDHRHHLVDAIVTALTSRSLYQQYAKAWKVADEKQRHGRVDVKVELPMPILTIRDIALEAVRSVRISHKPDRYPDGRFFEATAYGIAQRLDERSGEKVDWLVSRKSLTDLAPEKKSIDVDKVRANISRIVGEAIRLHISNIFEKRVSKGMTPQQALREPIEFQGNILRKVRCFYSKADDCVRIEHSSRRGHHYKMLLNDGFAYMEVPCKEGILYGVPNLVRPSEAVGIKRAPESGDFIRFYKGDTVKNIKTGRVYTIKQILGDGGGKLILTPVTETKPADLLSAKWGRLKVGGRNIHLLRLCAE

SEQ ID NO: 357 - protein, 1052 aa, Aminomonas paucivorans
MIGEHVRGGCLFDDHWTPNWGAFRLPNTVRTFTKAENPKDGSSLAEPRRQARGLRRRLRRKTQRLEDLRRLLAKEGVLSLSDLETLFRETPAKDPYQLRAEGLDRPLSFPEWVRVLYHITKHRGFQSNRRNPVEDGQERSRQEEEGKLLSGVGENERLLREGGYRTAGEMLARDPKFQDHRRNRAGDYSHTLSRSLLLEEARRLFQSQRTLGNPHASSNLEEAFLHLVAFQNPFASGEDIRNKAGHCSLEPDQIRAPRRSASAETFMLLQKTGNLRLIHRRTGEERPLTDKEREQIHLLAWKQEKVTHKTLRRHLEIPEEWLFTGLPYHRSGDKAEEKLFVHLAGIHEIRKALDKGPDPAVWDTLRSRRDLLDSIADTLTFYKNEDEILPRLESLGLSPENARALAPLSFSGTAHLSLSALGKLLPHLEEGKSYTQARADAGYAAPPPDRHPKLPPLEEADWRNPVVFRALTQTRKVVNALVRRYGPPWCIHLETARELSQPAKVRRRIETEQQANEKKKQQAEREFLDIVGTAPGPGDLLKMRLWREQGGFCPYCEEYLNPTRLAEPGYAEMDHILPYSRSLDNGWHNRVLVHGKDNRDKGNRTPFEAFGGDTARWDRLVAWVQASHLSAPKKRNLLREDFGEEAERELKDRNLTDTRFITKTAATLLRDRLTFHPEAPKDPVMTLNGRLTAFLRKQWGLHKNRKNGDLHHALDAAVLAVASRSFVYRLSSHNAAWGELPRGREAENGFSLPYPAFRSEVLARLCPTREEILLRLDQGGVGYDEAFRNGLRPVFVSRAPSRRLRGKAHMETLRSPKWKDHPEGPRTASRIPLKDLNLEKLERMVGKDRDRKLYEALRERLAAFGGNGKKAFVAPFRKPCRSGEGPLVRSLRIFDSGYSGVELRDGGEVYAVADHESMVRVDVYAKKNRFYLVPVYVADVARGIVKNRAIVAHKSEEEWDLVDGSFDFRFSLFPGDLVEIEKKDGAYLGYYKSCHRGDGRLLLDRHDRMPRESDCGTFYVSTRKDVLSMSKYQVDPLGEIRLVGSEKPPFVL

SEQ ID NO: 358 - protein, 1233 aa, Mycoplasma canis
MEKKRKVTLGFDLGIASVGWAIVDSETNQVYKLGSRLFDAPDTNLERRTQRGTRRLLRRRKYRNQKFYNLVKRTEVFGLSSREAIENRFRELSIKYPNIIELKTKALSQEVCPDEIAWILHDYLKNRGYFYDEKETKEDFDQQTVESMPSYKLNEFYKKYGYFKGALSQPTESEMKDNKDLKEAFFFDFSNKEWLKEINYFFNVQKNILSETFIEEFKKIFSFTRDISKGPGSDNMPSPYGIFGEFGDNGQGGRYEHIWDKNIGKCSIFTNEQRAPKYLPSALIFNFLNELANIRLYSTDKKNIQPLWKLSSVDKLNILLNLFNLPISEKKKKLTSTNINDIVKKESIKSIMISVEDIDMIKDEWAGKEPNVYGVGLSGLNIEESAKENKFKFQDLKILNVLINLLDNVGIKFEFKDRNDIIKNLELLDNLYLFLIYQKESNNKDSSIDLFIAKNESLNIENLKLKLKEFLLGAGNEFENHNSKTHSLSKKAIDEILPKLLDNNEGWNLEAIKNYDEEIKSQIEDNSSLMAKQDKKYLNDNFLKDAILPPNVKVTFQQAILIFNKIIQKFSKDFEIDKVVIELAREMTQDQENDALKGIAKAQKSKKSLVEERLEANNIDKSVFNDKYEKLIYKIFLWISQDFKDPYTGAQISVNEIVNNKVEIDHIIPYSLCFDDSSANKVLVHKQSNQEKSNSLPYEYIKQGHSGWNWDEFTKYVKRVFVNNVDSILSKKERLKKSENLLTASYDGYDKLGFLARNLNDTRYATILFRDQLNNYAEHHLIDNKKMFKVIAMNGAVTSFIRKNMSYDNKLRLKDRSDFSHHAYDAAIIALFSNKTKTLYNLIDPSLNGIISKRSEGYWVIEDRYTGEIKELKKEDWTSIKNNVQARKIAKEIEEYLIDLDDEVFFSRKTKRKTNRQLYNETIYGIATKTDEDGITNYYKKEKFSILDDKDIYLRLLREREKFVINQSNPEVIDQIIEIIESYGKENNIPSRDEAINIKYTKNKINYNLYLKQYMRSLTKSLDQFSEEFINQMIANKTFVLYNPTKNTTRKIKFLRLVNDVKINDIRKNQVINKFNGKNNEPKAFYENINSLGAIVFKNSANNFKTLSINTQIAIFGDKNWDIEDFKTYNMEKIEKYKEIYGIDKTYNFHSFIFPGTILLDKQNKEFYYISSIQTVRDIIEIKFLNKIEFKDENKNQDTSKTPKRLMFGIKSIMNNYEQVDISPFGINKKIFE

SEQ ID NO: 359 - protein, 1119 aa, Lactobacillus coryniformis
MGYRIGLDVGITSTGYAVLKTDKNGLPYKILTLDSVIYPRAENPQTGASLAEPRRIKRGLRRRTRRTKFRKQRTQQLFIHSGLLSKPEIEQILATPQAKYSVYELRVAGLDRRLTNSELFRVLYFFIGHRGFKSNRKAELNPENEADKKQMGQLLNSIEEIRKAIAEKGYRTVGELYLKDPKYNDHKRNKGYIDGYLSTPNRQMLVDEIKQILDKQRELGNEKLTDEFYATYLLGDENRAGIFQAQRDFDEGPGAGPYAGDQIKKMVGKDIFEPTEDRAAKATYTFQYFNLLQKMTSLNYQNTTGDTWHTLNGLDRQAIIDAVFAKAEKPTKTYKPTDFGELRKLLKLPDDARFNLVNYGSLQTQKEIETVEKKTRFVDFKAYHDLVKVLPEEMWQSRQLLDHIGTALTLYSSDKRRRRYFAEELNLPAELIEKLLPLNFSKFGHLSIKSMQNIIPYLEMGQVYSEATTNTGYDFRKKQISKDTIREEITNPVVRRAVTKTIKIVEQIIRRYGKPDGINIELARELGRNFKERGDIQKRQDKNRQTNDKIAAELTELGIPVNGQNIIRYKLHKEQNGVDPYTGDQIPFERAFSEGYEVDHIIPYSISWDDSYTNKVLTSAKCNREKGNRIPMVYLANNEQRLNALTNIADNIIRNSRKRQKLLKQKLSDEELKDWKQRNINDTRFITRVLYNYFRQAIEFNPELEKKQRVLPLNGEVTSKIRSRWGFLKVREDGDLHHAIDATVIAAITPKFIQQVTKYSQHQEVKNNQALWHDAEIKDAEYAAEAQRMDADLFNKIFNGFPLPWPEFLDELLARISDNPVEMMKSRSWNTYTPIEIAKLKPVFVVRLANHKISGPAHLDTIRSAKLFDEKGIVLSRVSITKLKINKKGQVATGDGIYDPENSNNGDKVVYSAIRQALEAHNGSGELAFPDGYLEYVDHGTKKLVRKVRVAKKVSLPVRLKNKAAADNGSMVRIDVFNTGKKFVFVPIYIKDTVEQVLPNKAIARGKSLWYQITESDQFCFSLYPGDMVHIESKTGIKPKYSNKENNTSVVPIKNFYGYFDGADIATASILVRAHDSSYTARSIGIAGLLKFEKYQVDYFGRYHKVHEKKRQLFVKRDE

SEQ ID NO: 360 - protein, 1195 aa, Elusimicrobium minutum
MQKNINTKQNHIYIKQAQKIKEKLGDKPYRIGLDLGVGSIGFAIVSMEENDGNVLLPKEIIMVGSRIFKASAGAADRKLSRGQRNNHRHTRERMRYLWKVLAEQKLALPVPADLDRKENSSEGETSAKRFLGDVLQKDIYELRVKSLDERLSLQELGYVLYHIAGHRGSSAIRTFENDSEEAQKENTENKKIAGNIKRLMAKKNYRTYGEYLYKEFFENKEKHKREKISNAANNHKFSPTRDLVIKEAEAILKKQAGKDGFHKELTEEYIEKLTKAIGYESEKLIPESGFCPYLKDEKRLPASHKLNEERRLWETLNNARYSDPIVDIVTGEITGYYEKQFTKEQKQKLFDYLLTGSELTPAQTKKLLGLKNTNFEDIILQGRDKKAQKIKGYKLIKLESMPFWARLSEAQQDSFLYDWNSCPDEKLLTEKLSNEYHLTEEEIDNAFNEIVLSSSYAPLGKSAMLIILEKIKNDLSYTEAVEEALKEGKLTKEKQAIKDRLPYYGAVLQESTQKIIAKGFSPQFKDKGYKTPHTNKYELEYGRIANPVVHQTLNELRKLVNEIIDILGKKPCEIGLETARELKKSAEDRSKLSREQNDNESNRNRIYEIYIRPQQQVIITRRENPRNYILKFELLEEQKSQCPFCGGQISPNDIINNQADIEHLFPIAESEDNGRNNLVISHSACNADKAKRSPWAAFASAAKDSKYDYNRILSNVKENIPHKAWRFNQGAFEKFIENKPMAARFKTDNSYISKVAHKYLACLFEKPNIICVKGSLTAQLRMAWGLQGLMIPFAKQLITEKESESFNKDVNSNKKIRLDNRHHALDAIVIAYASRGYGNLLNKMAGKDYKINYSERNWLSKILLPPNNIVWENIDADLESFESSVKTALKNAFISVKHDHSDNGELVKGTMYKIFYSERGYTLTTYKKLSALKLTDPQKKKTPKDFLETALLKFKGRESEMKNEKIKSAIENNKRLFDVIQDNLEKAKKLLEEENEKSKAEGKKEKNINDASIYQKAISLSGDKYVQLSKKEPGKFFAISKPTPTTTGYGYDTGDSLCVDLYYDNKGKLCGEIIRKIDAQQKNPLKYKEQGFTLFERIYGGDILEVDFDIHSDKNSFRNNTGSAPENRVFIKVGTFTEITNNNIQIWFGNIIKSTGGQDDSFTINSMQQYNPRKLILSSCGFIKYRSPILKNKEG

SEQ ID NO: 361 - protein, 1082 aa, Neisseria meningitidis; identical to SEQ ID NO: 25

SEQ ID NO: 362 - protein, 1056 aa, Pasteurella multocida
MQTTNLSYILGLDLGIASVGWAVVEINENEDPIGLIDVGVRIFERAEVPKTGESLALSRRLARSTRRLIRRRAHRLLLAKRFLKREGILSTIDLEKGLPNQAWELRVAGLERRLSAIEWGAVLLHLIKHRGYLSKRKNESQTNNKELGALLSGVAQNHQLLQSDDYRTPAELALKKFAKEEGHIRNQRGAYTHTFNRLDLLAELNLLFAQQHQFGNPHCKEHIQQYMTELLMWQKPALSGEAILKMLGKCTHEKNEFKAAKHTYSAERFVWLTKLNNLRILEDGAERALNEEERQLLINHPYEKSKLTYAQVRKLLGLSEQAIFKHLRYSKENAESATFMELKAWHAIRKALENQGLKDTWQDLAKKPDLLDEIGTAFSLYKTDEDIQQYLTNKVPNSVINALLVSLNFDKFIELSLKSLRKILPLMEQGKRYDQACREIYGHHYGEANQKTSQLLPAIPAQEIRNPVVLRTLSQARKVINAIIRQYGSPARVHIETGRELGKSFKERREIQKQQEDNRTKRESAVQKFKELFSDFSSEPKSKDILKFRLYEQQHGKCLYSGKEINIHRLNEKGYVEIDHALPFSRTWDDSFNNKVLVLASENQNKGNQTPYEWLQGKINSERWKNFVALVLGSQCSAAKKQRLLTQVIDDNKFIDRNLNDTRYIARFLSNYIQENLLLVGKNKKNVFTPNGQITALLRSRWGLIKARENNNRHHALDAIVVACATPSMQQKITRFIRFKEVHPYKIENRYEMVDQESGEIISPHFPEPWAYFRQEVNIRVFDNHPDTVLKEMLPDRPQANHQFVQPLFVSRAPTRKMSGQGHMETIKSAKRLAEGISVLRIPLTQLKPNLLENMVNKEREPALYAGLKARLAEFNQDPAKAFATPFYKQGGQQVKAIRVEQVQKSGVLVRENNGVADNASIVRTDVFIKNNKFFLVPIYTWQVAKGILPNKAIVAHKNEDEWEEMDEGAKFKFSLFPNDLVELKTKKEYFFGYYIGLDRATGNISLKEHDGEISKGKDGVYRVGVKLALSFEKYQVDELGKNRQICRPQQRQPVR

SEQ ID NO: 363 - protein, 1059 aa, Rhodovulum sp.
MGIRFAFDLGTNSIGWAVWRTGPGVFGEDTAASLDGSGVLIFKDGRNPKDGQSLATMRRVPRQSRKRRDRFVLRRRDLLAALRKAGLFPVDVEEGRRLAATDPYHLRAKALDESLTPHEMGRVIFHLNQRRGFRSNRKADRQDREKGKIAEGSKRLAETLAATNCRTLGEFLWSRHRGTPRTRSPTRIRMEGEGAKALYAFYPTREMVRAEFERLWTAQSRFAPDLLTPERHEEIAGILFRQRDLAPPKIGCCTFEPSERRLPRALPSVEARGIYERLAHLRITTGPVSDRGLTRPERDVLASALLAGKSLTFKAVRKTLKILPHALVNFEEAGEKGLDGALTAKLLSKPDHYGAAWHGLSFAEKDTFVGKLLDEADEERLIRRLVTENRLSEDAARRCASIPLADGYGRLGRTANTEILAALVEETDETGTVVTYAEAVRRAGERTGRNWHHSDERDGVILDRLPYYGEILQRHVVPGSGEPEEKNEAARWGRLANPTVHIGLNQLRKVVNRLIAAHGRPDQIVVELARELKLNREQKERLDRENRKNREENERRTAILAEHGQRDTAENKIRLRLFEEQARANAGIALCPYTGRAIGIAELFTSEVEIDHILPVSLTLDDSLANRVLCRREANREKRRQTPFQAFGATPAWNDIVARAAKLPPNKRWRFDPAALERFEREGGFLGRQLNETKYLSRLAKIYLGKICDPDRVYVTPGTLTGLLRARWGLNSILSDSNFKNRSDHRHHAVDAVVIGVLTRGMIQRIAHDAARAEDQDLDRVFRDVPVPFEDFRDHVRERVSTITVAVKPEHGKGGALHEDTSYGLVPDTDPNAALGNLVVRKPIRSLTAGEVDRVRDRALRARLGALAAPFRDESGRVRDAKGLAQALEAFGAENGIRRVRILKPDASVVTIADRRTGVPYRAVAPGENHHVDIVQMRDGSWRGFAASVFEVNRPGWRPEWEVKKLGGKLVMRLHKGDMVELSDKDGQRRVKVVQQIEISANRVRLSPHNDGGKLQDRHADADDPFRWDLATIPLLKDRGCVAVRVDPIGVVTLRRSNV

SEQ ID NO: 364 - protein, 1096 aa, Eubacterium dolichum
MMEVFMGRLVLGLDIGITSVGFGIIDLDESEIVDYGVRLFKEGTAAENETRRTKRGGRRLKRRRVTRREDMLHLLKQAGIISTSFHPLNNPYDVRVKGLNERLNGEELATALLHLCKHRGSSVETIEDDEAKAKEAGETKKVLSMNDQLLKSGKYVCEIQKERLRTNGHIRGHENNFKTRAYVDEAFQILSHQDLSNELKSAIITIISRKRMYYDGPGGPLSPTPYGRYTYFGQKEPIDLIEKMRGKCSLFPNEPRAPKLAYSAELFNLLNDLNNLSIEGEKLTSEQKAMILKIVHEKGKITPKQLAKEVGVSLEQIRGFRIDTKGSPLLSELTGYKMIREVLEKSNDEHLEDHVFYDEIAEILTKTKDIEGRKKQISELSSDLNEESVHQLAGLTKFTAYHSLSFKALRLINEEMLKTELNQMQSITLFGLKQNNELSVKGMKNIQADDTAILSPVAKRAQRETFKVVNRLREIYGEFDSIVVEMAREKNSEEQRKAIRERQKFFEMRNKQVADIIGDDRKINAKLREKLVLYQEQDGKTAYSLEPIDLKLLIDDPNAYEVDHIIPISISLDDSITNKVLVTHRENQEKGNLTPISAFVKGRFTKGSLAQYKAYCLKLKEKNIKTNKGYRKKVEQYLLNENDIYKYDIQKEFINRNLVDTSYASRVVLNTLTTYFKQNEIPTKVFTVKGSLTNAFRRKINLKKDRDEDYGHHAIDALIIASMPKMRLLSTIFSRYKIEDIYDESTGEVFSSGDDSMYYDDRYFAFIASLKAIKVRKFSHKIDTKPNRSVADETIYSTRVIDGKEKVVKKYKDIYDPKFTALAEDILNNAYQEKYLMALHDPQTFDQIVKVVNYYFEEMSKSEKYFTKDKKGRIKISGMNPLSLYRDEHGMLKKYSKKGDGPAITQMKYFDGVLGNHIDISAHYQVRDKKVVLQQISPYRTDFYYSKENGYKFVTIRYKDVRWSEKKKKYVIDQQDYAMKKAEKKIDDTYEFQFSMHRDELIGITKAEGEALIYPDETWHNFNFFFHAGETPEILKFTATNNDKSNKIEVKPIHCYCKMRLMPTISKKIVRIDKYATDVVGNLYKVKKNTLKFEFD

SEQ ID NO: 365 - protein, 1132 aa, Nitratifractor salsuginis
MKKILGVDLGITSFGYAILQETGKDLYRCLDNSVVMRNNPYDEKSGESSQSIRSTQKSMRRLIEKRKKRIRCVAQTMERYGILDYSETMKINDPKNNPIKNRWQLRAVDAWKRPLSPQELFAIFAHMAKHRGYKSIATEDLIYELELELGLNDPEKESEKKADERRQVYNALRHLEELRKKYGGETIAQTIHRAVEAGDLRSYRNHDDYEKMIRREDIEEEIEKVLLRQAELGALGLPEEQVSELIDELKACITDQEMPTIDESLFGKCTFYKDELAAPAYSYLYDLYRLYKKLADLNIDGYEVTQEDREKVIEWVEKKIAQGKNLKKITHKDLRKILGLAPEQKIFGVEDERIVKGKKEPRTFVPFFFLADIAKFKELFASIQKHPDALQIFRELAEILQRSKTPQEALDRLRALMAGKGIDTDDRELLELFKNKRSGTRELSHRYILEALPLFLEGYDEKEVQRILGFDDREDYSRYPKSLRHLHLREGNLFEKEENPINNHAVKSLASWALGLIADLSWRYGPFDEIILETTRDALPEKIRKEIDKAMREREKALDKIIGKYKKEFPSIDKRLARKIQLWERQKGLDLYSGKVINLSQLLDGSADIEHIVPQSLGGLSTDYNTIVTLKSVNAAKGNRLPGDWLAGNPDYRERIGMLSEKGLIDWKKRKNLLAQSLDEIYTENTHSKGIRATSYLEALVAQVLKRYYPFPDPELRKNGIGVRMIPGKVTSKTRSLLGIKSKSRETNFHHAEDALILSTLTRGWQNRLHRMLRDNYGKSEAELKELWKKYMPHIEGLTLADYIDEAFRRFMSKGEESLFYRDMFDTIRSISYWVDKKPLSASSHKETVYSSRHEVPTLRKNILEAFDSLNVIKDRHKLTTEEFMKRYDKEIRQKLWLHRIGNTNDESYRAVEERATQIAQILTRYQLMDAQNDKEIDEKFQQALKELITSPIEVTGKLLRKMRFVYDKLNAMQIDRGLVETDKNMLGIHISKGPNEKLIFRRMDVNNAHELQKERSGILCYLNEMLFIFNKKGLIHYGCLRSYLEKGQGSKYIALFNPRFPANPKAQPSKFTSDSKIKQVGIGSATGIIKAHLDLDGHVRSYEVFGTLPEGSIEWFKEESGYGRVEDDPHH

SEQ ID NO: 366 - protein, 1173 aa, Rhodospirillum rubrum
MRPIEPWILGLDIGTDSLGWAVFSCEEKGPPTAKELLGGGVRLFDSGRDAKDHTSRQAERGAFRRARRQTRTWPWRRDRLIALFQAAGLTPPAAETRQIALALRREAVSRPLAPDALWAALLHLAHHRGFRSNRIDKRERAAAKALAKAKPAKATAKATAPAKEADDEAGFWEGAEAALRQRMAASGAPTVGALLADDLDRGQPVRMRYNQSDRDGVVAPTRALIAEELAEIVARQSSAYPGLDWPAVTRLVLDQRPLRSKGAGPCAFLPGEDRALRALPTVQDFIIRQTLANLRLPSTSADEPRPLTDEEHAKALALLSTARFVEWPALRRALGLKRGVKFTAETERNGAKQAARGTAGNLTEAILAPLIPGWSGWDLDRKDRVFSDLWAARQDRSALLALIGDPRGPTRVTEDETAEAVADAIQIVLPTGRASLSAKAARAIAQAMAPGIGYDEAVTLALGLHHSHRPRQERLARLPYYAAALPDVGLDGDPVGPPPAEDDGAAAEAYYGRIGNISVHIALNETRKIVNALLHRHGPILRLVMVETTRELKAGADERKRMIAEQAERERENAEIDVELRKSDRWMANARERRQRVRLARRQNNLCPYTSTPIGHADLLGDAYDIDHVIPLARGGRDSLDNMVLCQSDANKTKGDKTPWEAFHDKPGWIAQRDDFLARLDPQTAKALAWRFADDAGERVARKSAEDEDQGFLPRQLTDTGYIARVALRYLSLVTNEPNAVVATNGRLTGLLRLAWDITPGPAPRDLLPTPRDALRDDTAARRFLDGLTPPPLAKAVEGAVQARLAALGRSRVADAGLADALGLTLASLGGGGKNRADHRHHFIDAAMIAVTTRGLINQINQASGAGRILDLRKWPRTNFEPPYPTFRAEVMKQWDHIHPSIRPAHRDGGSLHAATVFGVRNRPDARVLVQRKPVEKLFLDANAKPLPADKIAEIIDGFASPRMAKRFKALLARYQAAHPEVPPALAALAVARDPAFGPRGMTANTVIAGRSDGDGEDAGLITPFRANPKAAVRTMGNAVYEVWEIQVKGRPRWTHRVLTRFDRTQPAPPPPPENARLVMRLRRGDLVYWPLESGDRLFLVKKMAVDGRLALWPARLATGKATALYAQLSCPNINLNGDQGYCVQSAEGIRKEKIRTTSCTALGRLRLSKKAT

SEQ ID NO: 367 - protein, 1021 aa, Clostridium cellulolyticum
MKYTLGLDVGIASVGWAVIDKDNNKIIDLGVRCFDKAEESKTGESLATARRIARGMRRRISRRSQRLRLVKKLFVQYEIIKDSSEFNRIFDTSRDGWKDPWELRYNALSRILKPYELVQVLTHITKRRGFKSNRKEDLSTTKEGVVITSIKNNSEMLRTKNYRTIGEMIFMETPENSNKRNKVDEYIHTIAREDLLNEIKYIFSIQRKLGSPFVTEKLEHDFLNIWEFQRPFASGDSILSKVGKCTLLKEELRAPTSCYTSEYFGLLQSINNLVLVEDNNTLTLNNDQRAKIIEYAHFKNEIKYSEIRKLLDIEPEILFKAHNLTHKNPSGNNESKKFYEMKSYHKLKSTLPTDIWGKLHSNKESLDNLFYCLTVYKNDNEIKDYLQANNLDYLIEYIAKLPTFNKFKHLSLVAMKRIIPFMEKGYKYSDACNMAELDFTGSSKLEKCNKLTVEPIIENVTNPVVIRALTQARKVINAIIQKYGLPYMVNIELAREAGMTRQDRDNLKKEHENNRKAREKISDLIRQNGRVASGLDILKWRLWEDQGGRCAYSGKPIPVCDLLNDSLTQIDHIYPYSRSMDDSYMNKVLVLTDENQNKRSYTPYEVWGSTEKWEDFEARIYSMHLPQSKEKRLLNRNFITKDLDSFISRNLNDTRYISRFLKNYIESYLQFSNDSPKSCVVCVNGQCTAQLRSRWGLNKNREESDLHHALDAAVIACADRKIIKEITNYYNERENHNYKVKYPLPWHSFRQDLMETLAGVFISRAPRRKITGPAHDETIRSPKHFNKGLTSVKIPLTTVTLEKLETMVKNTKGGISDKAVYNVLKNRLIEHNNKPLKAFAEKIYKPLKNGTNGAIIRSIRVETPSYTGVFRNEGKGISDNSLMVRVDVFKKKDKYYLVPIYVAHMIKKELPSKAIVPLKPESQWELIDSTHEFLFSLYQNDYLVIKTKKGITEGYYRSCHRGTGSLSLMPHFANNKNVKIDIGVRTAISIEKYNVDILGNKSIVKGEPRRGMEKYNSFKSN

SEQ ID NO: 368 - protein, 1024 aa, Helicobacter mustelae
MIRTLGIDIGIASIGWAVIEGEYTDKGLENKEIVASGVRVFTKAENPKNKESLALPRTLARSARRRNARKKGRIQQVKHYLSKALGLDLECFVQGEKLATLFQTSKDFLSPWELRERALYRVLDKEELARVILHIAKRRGYDDITYGVEDNDSGKIKKAIAENSKRIKEEQCKTIGEMMYKLYFQKSLNVRNKKESYNRCVGRSELREELKTIFQIQQELKSPWVNEELIYKLLGNPDAQSKQEREGLIFYQRPLKGFGDKIGKCSHIKKGENSPYRACKHAPSAEEFVALTKSINFLKNLTNRHGLCFSQEDMCVYLGKILQEAQKNEKGLTYSKLKLLLDLPSDFEFLGLDYSGKNPEKAVFLSLPSTFKLNKITQDRKTQDKIANILGANKDWEAILKELESLQLSKEQIQTIKDAKLNFSKHINLSLEALYHLLPLMREGKRYDEGVEILQERGIFSKPQPKNRQLLPPLSELAKEESYFDIPNPVLRRALSEFRKVVNALLEKYGGFHYFHIELTRDVCKAKSARMQLEKINKKNKSENDAASQLLEVLGLPNTYNNRLKCKLWKQQEEYCLYSGEKITIDHLKDQRALQIDHAFPLSRSLDDSQSNKVLCLTSSNQEKSNKTPYEWLGSDEKKWDMYVGRVYSSNFSPSKKRKLTQKNFKERNEEDFLARNLVDTGYIGRVTKEYIKHSLSFLPLPDGKKEHIRIISGSMTSTMRSFWGVQEKNRDHHLHHAQDAIIIACIEPSMIQKYTTYLKDKETHRLKSHQKAQILREGDHKLSLRWPMSNFKDKIQESIQNIIPSHHVSHKVTGELHQETVRTKEFYYQAFGGEEGVKKALKFGKIREINQGIVDNGAMVRVDIFKSKDKGKFYAVPIYTYDFAIGKLPNKAIVQGKKNGIIKDWLEMDENYEFCFSLFKNDCIKIQTKEMQEAVLAIYKSTNSAKATIELEHLSKYALKNEDEEKMFTDTDKEKNKTMTRESCGIQGLKVFQKVKLSVLGEVLEHKPRNRQNIALKTTPKHV

SEQ ID NO: 369 - protein, 1092 aa, Ilyobacter polytropus
MKYSIGLDIGIASVGWSVINKDKERIEDMGVRIFQKAENPKDGSSLASSRREKRGSRRRNRRKKHRLDRIKNILCESGLVKKNEIEKIYKNAYLKSPWELRAKSLEAKISNKEIAQILLHIAKRRGFKSFRKTDRNADDTGKLLSGIQENKKIMEEKGYLTIGDMVAKDPKFNTHVRNKAGSYLFSFSRKLLEDEVRKIQAKQKELGNTHFTDDVLEKYIEVFNSQRNFDEGPSKPSPYYSEIGQIAKMIGNCTFESSEKRTAKNTWSGERFVFLQKLNNFRIVGLSGKRPLTEEERDIVEKEVYLKKEVRYEKLRKILYLKEEERFGDLNYSKDEKQDKKTEKTKFISLIGNYTIKKLNLSEKLKSEIEEDKSKLDKIIEILTFNKSDKTIESNLKKLELSREDIEILLSEEFSGTLNLSLKAIKKILPYLEKGLSYNEACEKADYDYKNNGIKFKRGELLPVVDKDLIANPVVLRAISQTRKVVNAIIRKYGTPHTIHVEVARDLAKSYDDRQTIIKENKKRELENEKTKKFISEEFGIKNVKGKLLLKYRLYQEQEGRCAYSRKELSLSEVILDESMTDIDHIIPYSRSMDDSYSNKVLVLSGENRKKSNLLPKEYFDRQGRDWDTFVLNVKAMKIHPRKKSNLLKEKFTREDNKDWKSRALNDTRYISRFVANYLENALEYRDDSPKKRVFMIPGQLTAQLRARWRLNKVRENGDLHHALDAAVVAVTDQKAINNISNISRYKELKNCKDVIPSIEYHADEETGEVYFEEVKDTRFPMPWSGFDLELQKRLESENPREEFYNLLSDKRYLGWFNYEEGFIEKLRPVFVSRMPNRGVKGQAHQETIRSSKKISNQIAVSKKPLNSIKLKDLEKMQGRDTDRKLYEALKNRLEEYDDKPEKAFAEPFYKPTNSGKRGPLVRGIKVEEKQNVGVYVNGGQASNGSMVRIDVFRKNGKFYTVPIYVHQTLLKELPNRAINGKPYKDWDLIDGSFEFLYSFYPNDLIEIEFGKSKSIKNDNKLTKTEIPEVNLSEVLGYYRGMDTSTGAATIDTQDGKIQMRIGIKTVKNIKKYQVDVLGNVYKVKREKRQTF

SEQ ID NO: 370 - protein, 1179 aa, Sphaerochaeta globus
MSKKVSRRYEEQAQEICQRLGSRPYSIGLDLGVGSIGVAVAAYDPIKKQPSDLVFVSSRIFIPSTGAAERRQKRGQRNSLRHRANRLKFLWKLLAERNLMLSYSEQDVPDPARLRFEDAVVRANPYELRLKGLNEQLTLSELGYALYHIANHRGSSSVRTFLDEEKSSDDKKLEEQQAMTEQLAKEKGISTFIEVLTAFNTNGLIGYRNSESVKSKGVPVPTRDIISNEIDVLLQTQKQFYQEILSDEYCDRIVSAILFENEKIVPEAGCCPYFPDEKKLPRCHFLNEERRLWEAINNARIKMPMQEGAAKRYQSASFSDEQRHILFHIARSGTDITPKLVQKEFPALKTSIIVLQGKEKAIQKIAGFRFRRLEEKSFWKRLSEEQKDDFFSAWTNTPDDKRLSKYLMKHLLLTENEVVDALKTVSLIGDYGPIGKTATQLLMKHLEDGLTYTEALERGMETGEFQELSVWEQQSLLPYYGQILTGSTQALMGKYWHSAFKEKRDSEGFFKPNTNSDEEKYGRIANPVVHQTLNELRKLMNELITILGAKPQEITVELARELKVGAEKREDIIKQQTKQEKEAVLAYSKYCEPNNLDKRYIERFRLLEDQAFVCPYCLEHISVADIAAGRADVDHIFPRDDTADNSYGNKVVAHRQCNDIKGKRTPYAAFSNTSAWGPIMHYLDETPGMWRKRRKFETNEEEYAKYLQSKGFVSRFESDNSYIAKAAKEYLRCLFNPNNVTAVGSLKGMETSILRKAWNLQGIDDLLGSRHWSKDADTSPTMRKNRDDNRHHGLDAIVALYCSRSLVQMINTMSEQGKRAVEIEAMIPIPGYASEPNLSFEAQRELFRKKILEFMDLHAFVSMKTDNDANGALLKDTVYSILGADTQGEDLVFVVKKKIKDIGVKIGDYEEVASAIRGRITDKQPKWYPMEMKDKIEQLQSKNEAALQKYKESLVQAAAVLEESNRKLIESGKKPIQLSEKTISKKALELVGGYYYLISNNKRTKTFVVKEPSNEVKGFAFDTGSNLCLDFYHDAQGKLCGEIIRKIQAMNPSYKPAYMKQGYSLYVRLYQGDVCELRASDLTEAESNLAKTTHVRLPNAKPGRTFVIIITFTEMGSGYQIYFSNLAKSKKGQDTSFTLTTIKNYDVRKVQLSSAGLVRYVSPLLVDKIEKDEVALCGE

SEQ ID NO: 371 - protein, 1054 aa, Staphylococcus lugdunensis
MNQKFILGLDIGITSVGYGLIDYETKNIIDAGVRLFPEANVENNEGRRSKRGSRRLKRRRIHRLERVKKLLEDYNLLDQSQIPQSTNPYAIRVKGLSEALSKDELVIALLHIAKRRGIHKIDVIDSNDDVGNELSTKEQLNKNSKLLKDKFVCQIQLERMNEGQVRGEKNRFKTADIIKEIIQLLNVQKNFHQLDENFINKYIELVEMRREYFEGPGKGSPYGWEGDPKAWYETLMGHCTYFPDELRSVKYAYSADLFNALNDLNNLVIQRDGLSKLEYHEKYHIIENVFKQKKKPTLKQIANEINVNPEDIKGYRITKSGKPQFTEFKLYHDLKSVLFDQSILENEDVLDQIAEILTIYQDKDSIKSKLTELDILLNEEDKENIAQLTGYTGTHRLSLKCIRLVLEEQWYSSRNQMEIFTHLNIKPKKINLTAANKIPKAMIDEFILSPVVKRTFGQAINLINKIIEKYGVPEDIIIELARENNSKDKQKFINEMQKKNENTRKRINEIIGKYGNQNAKRLVEKIRLHDEQEGKCLYSLESIPLEDLLNNPNHYEVDHIIPRSVSFDNSYHNKVLVKQSENSKKSNLTPYQYFNSGKSKLSYNQFKQHILNLSKSQDRISKKKKEYLLEERDINKFEVQKEFINRNLVDTRYATRELTNYLKAYFSANNMNVKVKTINGSFTDYLRKVWKFKKERNHGYKHHAEDALIIANADFLFKENKKLKAVNSVLEKPEIESKQLDIQVDSEDNYSEMFIIPKQVQDIKDFRNFKYSHRVDKKPNRQLINDTLYSTRKKDNSTYIVQTIKDIYAKDNTTLKKQFDKSPEKFLMYQHDPRTFEKLEVIMKQYANEKNPLAKYHEETGEYLTKYSKKNNGPIVKSLKYIGNKLGSHLDVTHQFKSSTKKLVKLSIKPYRFDVYLTDKGYKFITISYLDVLKKDNYYYIPEQKYDKLKLGKAIDKNAKFIASFYKNDLIKLDGEIYKIIGVNSDTRNMIELDLPDIRYKEYCELNNIKGEPRIKKTIGKKVNSIEKLTTDVLGNVFTNTQYTKPQLLFKRGN

SEQ ID NO: 372 - protein, 1061 aa, Treponema sp.
MIMKLEKWRLGLDLGTNSIGWSVFSLDKDNSVQDLIDMGVRIFSDGRDPKTKEPLAVARRTARSQRKLIYRRKLRRKQVFKFLQEQGLFPKTKEECMTLKSLNPYELRIKALDEKLEPYELGRALFNLAVRRGFKSNRKDGSREEVSEKKSPDEIKTQADMQTHLEKAIKENGCRTITEFLYKNQGENGGIRFAPGRMTYYPTRKMYEEEFNLIRSKQEKYYPQVDWDDIYKAIFYQRPLKPQQRGYCIYENDKERTFKAMPCSQKLRILQDIGNLAYYEGGSKKRVELNDNQDKVLYELLNSKDKVTFDQMRKALCLADSNSFNLEENRDFLIGNPTAVKMRSKNRFGKLWDEIPLEEQDLIIETIITADEDDAVYEVIKKYDLTQEQRDFIVKNTILQSGTSMLCKEVSEKLVKRLEEIADLKYHEAVESLGYKFADQTVEKYDLLPYYGKVLPGSTMEIDLSAPETNPEKHYGKISNPTVHVALNQTRVVVNALIKEYGKPSQIAIELSRDLKNNVEKKAEIARKQNQRAKENIAINDTISALYHTAFPGKSFYPNRNDRMKYRLWSELGLGNKCIYCGKGISGAELFTKEIEIEHILPFSRTLLDAESNLTVAHSSCNAFKAERSPFEAFGTNPSGYSWQEIIQRANQLKNTSKKNKFSPNAMDSFEKDSSFIARQLSDNQYIAKAALRYLKCLVENPSDVWTTNGSMTKLLRDKWEMDSILCRKFTEKEVALLGLKPEQIGNYKKNRFDHRHHAIDAVVIGLTDRSMVQKLATKNSHKGNRIEIPEFPILRSDLIEKVKNIVVSFKPDHGAEGKLSKETLLGKIKLHGKETFVCRENIVSLSEKNLDDIVDEIKSKVKDYVAKHKGQKIEAVLSDFSKENGIKKVRCVNRVQTPIEITSGKISRYLSPEDYFAAVIWEIPGEKKTFKAQYIRRNEVEKNSKGLNVVKPAVLENGKPHPAAKQVCLLHKDDYLEFSDKGKMYFCRIAGYAATNNKLDIRPVYAVSYCADWINSTNETMLTGYWKPTPTQNWVSVNVLFDKQKARLVTVSPIGRVFRK

SEQ ID NO: 373 - protein, 1011 aa, Unknown
  Uncultured delta polypeptide
MSSKAIDSLEQLDLFKPQEYTLGLDLGIKSIGWAILSGERIANAGVYLFETAEELNSTGNKLISKAAERGRKRRIRRMLDRKARRGRHIRYLLEREGLPTDELEEVVVHQSNRTLWDVRAEAVERKLTKQELAAVLFHLVRHRGYFPNTKKLPPDDESDSADEEQGKINRATSRLREELKASDCKTIGQFLAQNRDRQRNREGDYSNLMARKLVFEEALQILAFQRKQGHELSKDFEKTYLDVLMGQRSGRSPKLGNCSLIPSELRAPSSAPSTEWFKFLQNLGNLQISNAYREEWSIDAPRRAQIIDACSQRSTSSYWQIRRDFQIPDEYRFNLVNYERRDPDVDLQEYLQQQERKTLANFRNWKQLEKIIGTGHPIQTLDEAARLITLIKDDEKLSDQLADLLPEASDKAITQLCELDFTTAAKISLEAMYRILPHMNQGMGFFDACQQESLPEIGVPPAGDRVPPFDEMYNPVVNRVLSQSRKLINAVIDEYGMPAKIRVELARDLGKGRELRERIKLDQLDKSKQNDQRAEDFRAEFQQAPRGDQSLRYRLWKEQNCTCPYSGRMIPVNSVLSEDTQIDHILPISQSFDNSLSNKVLCFTEENAQKSNRTPFEYLDAADFQRLEAISGNWPEAKRNKLLHKSFGKVAEEWKSRALNDTRYLTSALADHLRHHLPDSKIQTVNGRITGYLRKQWGLEKDRDKHTHHAVDAIVVACTTPAIVQQVTLYHQDIRRYKKLGEKRPTPWPETFRQDVLDVEEEIFITRQPKKVSGGIQTKDTLRKHRSKPDRQRVALTKVKLADLERLVEKDASNRNLYEHLKQCLEESGDQPTKAFKAPFYMPSGPEAKQRPILSKVTLLREKPEPPKQLTELSGGRRYDSMAQGRLDIYRYKPGGKRKDEYRVVLQRMIDLMRGEENVHVFQKGVPYDQGPEIEQNYTFLFSLYFDDLVEFQRSADSEVIRGYYRTFNIANGQLKISTYLEGRQDFDFFGANRLAHFAKVQVNLLGKVIK

SEQ ID NO: 374 - protein, 1029 aa, Alicycliphilus denitrificans
MRSLRYRLALDLGSTSLGWALFRLDACNRPTAVIKAGVRIFSDGRNPKDGSSLAVTRRAARAMRRRRDRLLKRKTRMQAKLVEHGFFPADAGKRKALEQLNPYALRAKGLQEALLPGEFARALFHINQRRGFKSNRKTDKKDNDSGVLKKAIGQLRQQMAEQGSRTVGEYLWTRLQQGQGVRARYREKPYTTEEGKKRIDKSYDLYIDRAMIEQEFDALWAAQAAFNPTLFHEAARADLKDTLLHQRPLRPVKPGRCTLLPEEERAPLALPSTQRFRIHQEVNHLRLLDENLREVALTLAQRDAVVTALETKAKLSFEQIRKLLKLSGSVQFNLEDAKRTELKGNATSAALARKELFGAAWSGFDEALQDEIVWQLVTEEGEGALIAWLQTHTGVDEARAQAIVDVSLPEGYGNLSRKALARIVPALRAAVITYDKAVQAAGFDHHSQLGFEYDASEVEDLVHPETGEIRSVFKQLPYYGKALQRHVAFGSGKPEDPDEKRYGKIANPTVHIGLNQVRMVVNALIRRYGRPTEVVIELARDLKQSREQKVEAQRRQADNQRRNARIRRSIAEVLGIGEERVRGSDIQKWICWEELSFDAADRRCPYSGVQISAAMLLSDEVEVEHILPFSKTLDDSLNNRTVAMRQANRIKRNRTPWDARAEFEAQGWSYEDILQRAERMPLRKRYRFAPDGYERWLGDDKDFLARALNDTRYLSRVAAEYLRLVCPGTRVIPGQLTALLRGKFGLNDVLGLDGEKNRNDHRHHAVDACVIGVTDQGLMQRFATASAQARGDGLTRLVDGMPMPWPTYRDHVERAVRHIWVSHRPDHGFEGAMMEETSYGIRKDGSIKQRRKADGSAGREISNLIRIHEATQPLRHGVSADGQPLAYKGYVGGSNYCIEITVNDKGKWEGEVISTFRAYGVVRAGGMGRLRNPHEGQNGRKLIMRLVIGDSVRLEVDGAERTMRIVKISGSNGQIFMAPIHEANVDARNTDKQDAFTYTSKYAGSLQKAKTRRVTISPIGEVRDPGFKG

SEQ ID NO: 375 - protein, 1168 aa, Azospirillum sp.
MARPAFRAPRREHVNGWTPDPHRISKPFFILVSWHLLSRVVIDSSSGCFPGTSRDHTDKFAEWECAVQPYRLSFDLGTNSIGWGLLNLDRQGKPREIRALGSRIFSDGRDPQDKASLAVARRLARQMRRRRDRYLTRRTRLMGALVRFGLMPADPAARKRLEVAVDPYLARERATRERLEPFEIGRALFHLNQRRGYKPVRTATKPDEEAGKVKEAVERLEAAIAAAGAPTLGAWFAWRKTRGETLRARLAGKGKEAAYPFYPARRMLEAEFDTLWAEQARHHPDLLTAEAREILRHRIFHQRPLKPPPVGRCTLYPDDGRAPRALPSAQRLRLFQELASLRVIHLDLSERPLTPAERDRIVAFVQGRPPKAGRKPGKVQKSVPFEKLRGLLELPPGTGFSLESDKRPELLGDETGARIAPAFGPGWTALPLEEQDALVELLLTEAEPERAIAALTARWALDEATAAKLAGATLPDFHGRYGRRAVAELLPVLERETRGDPDGRVRPIRLDEAVKLLRGGKDHSDFSREGALLDALPYYGAVLERHVAFGTGNPADPEEKRVGRVANPTVHIALNQLRHLVNAILARHGRPEEIVIELARDLKRSAEDRRREDKRQADNQKRNEERKRLILSLGERPTPRNLLKLRLWEEQGPVENRRCPYSGETISMRMLLSEQVDIDHILPFSVSLDDSAANKVVCLREANRIKRNRSPWEAFGHDSERWAGILARAEALPKNKRWRFAPDALEKLEGEGGLRARHLNDTRHLSRLAVEYLRCVCPKVRVSPGRLTALLRRRWGIDAILAEADGPPPEVPAETLDPSPAEKNRADHRHHALDAVVIGCIDRSMVQRVQLAAASAEREAAAREDNIRRVLEGFKEEPWDGFRAELERRARTIVVSHRPEHGIGGALHKETAYGPVDPPEEGFNLVVRKPIDGLSKDEINSVRDPRLRRALIDRLAIRRRDANDPATALAKAAEDLAAQPASRGIRRVRVLKKESNPIRVEHGGNPSGPRSGGPFHKLLLAGEVHHVDVALRADGRRWVGHWVTLFEAHGGRGADGAAAPPRLGDGERFLMRLHKGDCLKLEHKGRVRVMQVVKLEPSSNSVVVVEPHQVKTDRSKHVKISCDQLRARGARRVTVDPLGRVRVHAPGARVGIGGDAGRTAMEPAEDIS

SEQ ID NO: 376 - protein, 1064 aa, Bradyrhizobium sp.
MKRTSLRAYRLGVDLGANSLGWFVVWLDDHGQPEGLGPGGVRIFPDGRNPQSKQSNAAGRRLARSARRRRDRYLQRRGKLMGLLVKHGLMPADEPARKRLECLDPYGLRAKALDEVLPLHHVGRALFHLNQRRGLFANRAIEQGDKDASAIKAAAGRLQTSMQACGARTLGEFLNRRHQLRATVRARSPVGGDVQARYEFYPTRAMVDAEFEAIWAAQAPHHPTMTAEAHDTIREAIFSQRAMKRPSIGKCSLDPATSQDDVDGFRCAWSHPLAQRFRIWQDVRNLAVVETGPTSSRLGKEDQDKVARALLQTDQLSFDEIRGLLGLPSDARFNLESDRRDHLKGDATGAILSARRHFGPAWHDRSLDRQIDIVALLESALDEAAIIASLGTTHSLDEAAAQRALSALLPDGYCRLGLRAIKRVLPLMEAGRTYAEAASAAGYDHALLPGGKLSPTGYLPYYGQWLQNDVVGSDDERDTNERRWGRLPNPTVHIGIGQLRRVVNELIRWHGPPAEITVELTRDLKLSPRRLAELEREQAENQRKNDKRTSLLRKLGLPASTHNLLKLRLWDEQGDVASECPYTGEAIGLERLVSDDVDIDHLIPFSISWDDSAANKVVCMRYANREKGNRTPFEAFGHRQGRPYDWADIAERAARLPRGKRWRFGPGARAQFEELGDFQARLLNETSWLARVAKQYLAAVTHPHRIHVLPGRLTALLRATWELNDLLPGSDDRAAKSRKDHRHHAIDALVAALTDQALLRRMANAHDDTRRKIEVLLPWPTFRIDLETRLKAMLVSHKPDHGLQARLHEDTAYGTVEHPETEDGANLVYRKTFVDISEKEIDRIRDRRLRDLVRAHVAGERQQGKTLKAAVLSFAQRRDIAGHPNGIRHVRLTKSIKPDYLVPIRDKAGRIYKSYNAGENAFVDILQAESGRWIARATTVFQANQANESHDAPAAQPIMRVFKGDMLRIDHAGAEKFVKIVRLSPSNNLLYLVEHHQAGVFQTRHDDPEDSFRWLFASFDKLREWNAELVRIDTLGQPWRRKRGLETGSEDATRIGWTRPKKWP

SEQ ID NO: 377 - protein, 1037 aa, Parvibaculum lavamentivorans
MERIFGFDIGTTSIGFSVIDYSSTQSAGNIQRLGVRIFPEARDPDGTPLNQQRRQKRMMRRQLRRRRIRRKALNETLHEAGFLPAYGSADWPVVMADEPYELRRRGLEEGLSAYEFGRAIYHLAQHRHFKGRELEESDTPDPDVDDEKEAANERAATLKALKNEQTTLGAWLARRPPSDRKRGIHAHRNVVAEEFERLWEVQSKFHPALKSEEMRARISDTIFAQRPVFWRKNTLGECRFMPGEPLCPKGSWLSQQRRMLEKLNNLAIAGGNARPLDAEERDAILSKLQQQASMSWPGVRSALKALYKQRGEPGAEKSLKFNLELGGESKLLGNALEAKLADMFGPDWPAHPRKQEIRHAVHERLWAADYGETPDKKRVIILSEKDRKAHREAAANSFVADFGITGEQAAQLQALKLPTGWEPYSIPALNLFLAELEKGERFGALVNGPDWEGWRRTNFPHRNQPTGEILDKLPSPASKEERERISQLRNPTVVRTQNELRKVVNNLIGLYGKPDRIRIEVGRDVGKSKREREEIQSGIRRNEKQRKKATEDLIKNGIANPSRDDVEKWILWKEGQERCPYTGDQIGFNALFREGRYEVEHIWPRSRSFDNSPRNKTLCRKDVNIEKGNRMPFEAFGHDEDRWSAIQIRLQGMVSAKGGTGMSPGKVKRFLAKTMPEDFAARQLNDTRYAAKQILAQLKRLWPDMGPEAPVKVEAVTGQVTAQLRKLWTLNNILADDGEKTRADHRHHAIDALTVACTHPGMTNKLSRYWQLRDDPRAEKPALTPPWDTIRADAEKAVSEIVVSHRVRKKVSGPLHKETTYGDTGTDIKTKSGTYRQFVTRKKIESLSKGELDEIRDPRIKEIVAAHVAGRGGDPKKAFPPYPCVSPGGPEIRKVRLTSKQQLNLMAQTGNGYADLGSNHHIAIYRLPDGKADFEIVSLFDASRRLAQRNPIVQRTRADGASFVMSLAAGEAIMIPEGSKKGIWIVQGVWASGQVVLERDTDADHSTTTRPMPNPILKDDAKKVSIDPIGRVRPSND

SEQ ID NO: 378 - protein, 1218 aa, Prevotella timonensis
MNKRILGLDTGTNSLGWAVVDWDEHAQSYELIKYGDVIFQEGVKIEKGIESSKAAERSGYKAIRKQYFRRRLRKIQVLKVLVKYHLCPYLSDDDLRQWHLQKQYPKSDELMLWQRTSDEEGKNPYYDRHRCLHEKLDLTVEADRYTLGRALYHLTQRRGFLSNRLDTSADNKEDGVVKSGISQLSTEMEEAGCEYLGDYFYKLYDAQGNKVRIRQRYTDRNKHYQHEFDAICEKQELSSELIEDLQRAIFFQLPLKSQRHGVGRCTFERGKPRCADSHPDYEEFRMLCFVNNIQVKGPHDLELRPLTYEEREKIEPLFFRKSKPNFDFEDIAKALAGKKNYAWIHDKEERAYKFNYRMTQGVPGCPTIAQLKSIFGDDWKTGIAETYTLIQKKNGSKSLQEMVDDVWNVLYSFSSVEKLKEFAHHKLQLDEESAEKFAKIKLSHSFAALSLKAIRKFLPFLRKGMYYTHASFFANIPTIVGKEIWNKEQNRKYIMENVGELVFNYQPKHREVQGTIEMLIKDFLANNFELPAGATDKLYHPSMIETYPNAQRNEFGILQLGSPRTNAIRNPMAMRSLHILRRVVNQLLKESIIDENTEVHVEYARELNDANKRRAIADRQKEQDKQHKKYGDEIRKLYKEETGKDIEPTQTDVLKFQLWEEQNHHCLYTGEQIGITDFIGSNPKFDIEHTIPQSVGGDSTQMNLTLCDNRFNREVKKAKLPTELANHEEILTRIEPWKNKYEQLVKERDKQRTFAGMDKAVKDIRIQKRHKLQMEIDYWRGKYERFTMTEVPEGFSRRQGTGIGLISRYAGLYLKSLFHQADSRNKSNVYVVKGVATAEFRKMWGLQSEYEKKCRDNHSHHCMDAITIACIGKREYDLMAEYYRMEETFKQGRGSKPKFSKPWATFTEDVLNIYKNLLVVHDTPNNMPKHTKKYVQTSIGKVLAQGDTARGSLHLDTYYGAIERDGEIRYVVRRPLSSFTKPEELENIVDETVKRTIKEAIADKNFKQAIAEPIYMNEEKGILIKKVRCFAKSVKQPINIRQHRDLSKKEYKQQYHVMNENNYLLAIYEGLVKNKVVREFEIVSYIEAAKYYKRSQDRNIFSSIVPTHSTKYGLPLKTKLLMGQLVLMFEENPDEIQVDNTKDLVKRLYKVVGIEKDGRIKFKYHQEARKEGLPIFSTPYKNNDDYAPIFRQSINNINILVDGIDFTIDILGKVTLKE

SEQ ID NO: 379 - protein, 1088 aa, Bacillus smithii
MNYKMGLDIGIASVGWAVINLDLKRIEDLGVRIFDKAEHPQNGESLALPRRIARSARRRLRRRKHRLERIRRLLVSENVLTKEEMNLLFKQKKQIDVWQLRVDALERKLNNDELARVLLHLAKRRGFKSNRKSERNSKESSEFLKNIEENQSILAQYRSVGEMIVKDSKFAYHKRNKLDSYSNMIARDDLEREIKLIFEKQREFNNPVCTERLEEKYLNIWSSQRPFASKEDIEKKVGFCTFEPKEKRAPKATYTFQSFIVWEHINKLRLVSPDETRALTEIERNLLYKQAFSKNKMTYYDIRKLLNLSDDIHFKGLLYDPKSSLKQIENIRFLELDSYHKIRKCIENVYGKDGIRMFNETDIDTFGYALTIFKDDEDIVAYLQNEYITKNGKRVSNLANKVYDKSLIDELLNLSFSKFAHLSMKAIRNILPYMEQGEIYSKACELAGYNFTGPKKKEKALLLPVIPNIANPVVMRALTQSRKVVNAIIKKYGSPVSIHIELARDLSHSFDERKKIQKDQTENRKKNETAIKQLIEYELTKNPTGLDIVKFKLWSEQQGRCMYSLKPIELERLLEPGYVEVDHILPYSRSLDDSYANKVLVLTKENREKGNHTPVEYLGLGSERWKKFEKFVLANKQFSKKKKQNLLRLRYEETEEKEFKERNLNDTRYISKFFANFIKEHLKFADGDGGQKVYTINGKITAHLRSRWDFNKNREESDLHHAVDAVIVACATQGMIKKITEFYKAREQNKESAKKKEPIFPQPWPHFADELKARLSKFPQESIEAFALGNYDRKKLESLRPVFVSRMPKRSVTGAAHQETLRRCVGIDEQSGKIQTAVKTKLSDIKLDKDGHFPMYQKESDPRTYEAIRQRLLEHNNDPKKAFQEPLYKPKKNGEPGPVIRTVKIIDTKNKVVHLDGSKTVAYNSNIVRTDVFEKDGKYYCVPVYTMDIMKGTLPNKAIEANKPYSEWKEMTEEYTFQFSLFPNDLVRIVLPREKTIKTSTNEEIIIKDIFAYYKTIDSATGGLELISHDRNFSLRGVGSKTLKRFEKYQVDVLGNIHKVKGEKRVGLAAPTNQKKGKTVDSLQSVSD

SEQ ID NO: 380 - protein, 1035 aa, Puniceispirillum marinum
MRRLGLDLGTNSIGWCLLDLGDDGEPVSIFRTGARIFSDGRDPKSLGSLKATRREARLTRRRRDRFIQRQKNLINALVKYGLMPADEIQRQALAYKDPYPIRKKALDEAIDPYEMGRAIFHINQRRGFKSNRKSADNEAGVVKQSIADLEMKLGEAGARTIGEFLADRQATNDTVRARRLSGTNALYEFYPDRYMLEQEFDTLWAKQAAFNPSLYIEAARERLKEIVFFQRKLKPQEVGRCIFLSDEDRISKALPSFQRFRIYQELSNLAWIDHDGVAHRITASLALRDHLFDELEHKKKLTFKAMRAILRKQGVVDYPVGFNLESDNRDHLIGNLTSCIMRDAKKMIGSAWDRLDEEEQDSFILMLQDDQKGDDEVRSILTQQYGLSDDVAEDCLDVRLPDGHGSLSKKAIDRILPVLRDQGLIYYDAVKEAGLGEANLYDPYAALSDKLDYYGKALAGHVMGASGKFEDSDEKRYGTISNPTVHIALNQVRAVVNELIRLHGKPDEVVIEIGRDLPMGADGKRELERFQKEGRAKNERARDELKKLGHIDSRESRQKFQLWEQLAKEPVDRCCPFTGKMMSISDLFSDKVEIEHLLPFSLTLDDSMANKTVCFRQANRDKGNRAPFDAFGNSPAGYDWQEILGRSQNLPYAKRWRFLPDAMKRFEADGGFLERQLNDTRYISRYTTEYISTIIPKNKIWVVTGRLTSLLRGFWGLNSILRGHNTDDGTPAKKSRDDHRHHAIDAIVVGMTSRGLLQKVSKAARRSEDLDLTRLFEGRIDPWDGFRDEVKKHIDAIIVSHRPRKKSQGALHNDTAYGIVEHAENGASTVVHRVPITSLGKQSDIEKVRDPLIKSALLNETAGLSGKSFENAVQKWCADNSIKSLRIVETVSIIPITDKEGVAYKGYKGDGNAYMDIYQDPTSSKWKGEIVSRFDANQKGFIPSWQSQFPTARLIMRLRINDLLKLQDGEIEEIYRVQRLSGSKILMAPHTEANVDARDRDKNDTFKLTSKSPGKLQSASARKVHISPTGLIREG

SEQ ID NO: 381 - protein, 1153 aa, Barnesiella intestinihominis
MKNILGLDLGLSSIGWSVIRENSEEQELVAMGSRVVSLTAAELSSFTQGNGVSINSQRTQKRTQRKGYDRYQLRRTLLRNKLDTLGMLPDDSLSYLPKLQLWGLRAKAVTQRIELNELGRVLLHLNQKRGYKSIKSDFSGDKKITDYVKTVKTRYDELKEMRLTIGELFFRRLTENAFFRCKEQVYPRQAYVEEFDCIMNCQRKFYPDILTDETIRCIRDEIIYYQRPLKSCKYLVSRCEFEKRFYLNAAGKKTEAGPKVSPRTSPLFQVCRLWESINNIVVKDRRNEIVFISAEQRAALFDFLNTHEKLKGSDLLKLLGLSKTYGYRLGEQFKTGIQGNKTRVEIERALGNYPDKKRLLQFNLQEESSSMVNTETGEIIPMISLSFEQEPLYRLWHVLYSIDDREQLQSVLRQKFGIDDDEVLERLSAIDLVKAGFGNKSSKAIRRILPFLQLGMNYAEACEAAGYNHSNNYTKAENEARALLDRLPAIKKNELRQPVVEKILNQMVNVVNALMEKYGRFDEIRVELARELKQSKEERSNTYKSINKNQRENEQIAKRIVEYGVPTRSRIQKYKMWEESKHCCIYCGQPVDVGDFLRGFDVEVEHIIPKSLYFDDSFANKVCSCRSCNKEKNNRTAYDYMKSKGEKALSDYVERVNTMYTNNQISKTKWQNLLTPVDKISIDFIDRQLRESQYIARKAKEILTSICYNVTATSGSVTSFLRHVWGWDTVLHDLNFDRYKKVGLTEVIEVNHRGSVIRREQIKDWSKRFDHRHHAIDALTIACTKQAYIQRLNNLRAEEGPDFNKMSLERYIQSQPHFSVAQVREAVDRILVSFRAGKRAVTPGKRYIRKNRKRISVQSVLIPRGALSEESVYGVIHVWEKDEQGHVIQKQRAVMKYPITSINREMLDKEKVVDKRIHRILSGRLAQYNDNPKEAFAKPVYIDKECRIPIRTVRCFAKPAINTLVPLKKDDKGNPVAWVNPGNNHHVAIYRDEDGKYKERTVTFWEAVDRCRVGIPAIVTQPDTIWDNILQRNDISENVLESLPDVKWQFVLSLQQNEMFILGMNEEDYRYAMDQQDYALLNKYLYRVQKLSKSDYSFRYHTETSVEDKYDGKPNLKLSMQMGKLKRVSIKSLLGLNPHKVHISVLGEIKEIS

SEQ ID NO: 382 - protein, 1062 aa, Ralstonia syzygii
MAEKQHRWGLDIGTNSIGWAVIALIEGRPAGLVATGSRIFSDGRNPKDGSSLAVERRGPRQMRRRRDRYLRRRDRFMQALINVGLMPGDAAARKALVTENPYVLRQRGLDQALTLPEFGRALFHLNQRRGFQSNRKTDRATAKESGKVKNAIAAFRAGMGNARTVGEALARRLEDGRPVRARMVGQGKDEHYELYIAREWIAQEFDALWASQQRFHAEVLADAARDRLRAILLFQRKLLPVPVGKCFLEPNQPRVAAALPSAQRFRLMQELNHLRVMTLADKRERPLSFQERNDLLAQLVARPKCGFDMLRKIVFGANKEAYRFTIESERRKELKGCDTAAKLAKVNALGTRWQALSLDEQDRLVCLLLDGENDAVLADALREHYGLTDAQIDTLLGLSFEDGHMRLGRSALLRVLDALESGRDEQGLPLSYDKAVVAAGYPAHTADLENGERDALPYYGELLWRYTQDAPTAKNDAERKFGKIANPTVHIGLNQLRKLVNALIQRYGKPAQIVVELARNLKAGLEEKERIKKQQTANLERNERIRQKLQDAGVPDNRENRLRMRLFEELGQGNGLGTPCIYSGRQISLQRLFSNDVQVDHILPFSKTLDDSFANKVLAQHDANRYKGNRGPFEAFGANRDGYAWDDIRARAAVLPRNKRNRFAETAMQDWLHNETDFLARQLTDTAYLSRVARQYLTAICSKDDVYVSPGRLTAMLRAKWGLNRVLDGVMEEQGRPAVKNRDDHRHHAIDAVVIGATDRAMLQQVATLAARAREQDAERLIGDMPTPWPNFLEDVRAAVARCVVSHKPDHGPEGGLHNDTAYGIVAGPFEDGRYRVRHRVSLFDLKPGDLSNVRCDAPLQAELEPIFEQDDARAREVALTALAERYRQRKVWLEELMSVLPIRPRGEDGKTLPDSAPYKAYKGDSNYCYELFINERGRWDGELISTFRANQAAYRRFRNDPARFRRYTAGGRPLLMRLCINDYIAVGTAAERTIFRVVKMSENKITLAEHFEGGTLKQRDADKDDPFKYLTKSPGALRDLGARRIFVDLIGRVLDPGIKGD

SEQ ID NO: 383 - protein, 1059 aa, Wolinella succinogenes
MIERILGVDLGISSLGWAIVEYDKDDEAANRIIDCGVRLFTAAETPKKKESPNKARREARGIRRVLNRRRVRMNMIKKLFLRAGLIQDVDLDGEGGMFYSKANRADVWELRHDGLYRLLKGDELARVLIHIAKHRGYKFIGDDEADEESGKVKKAGVVLRQNFEAAGCRTVGEWLWRERGANGKKRNKHGDYEISIHRDLLVEEVEAIFVAQQEMRSTIATDALKAAYREIAFFVRPMQRIEKMVGHCTYFPEERRAPKSAPTAEKFIAISKFFSTVIIDNEGWEQKIIERKTLEELLDFAVSREKVEFRHLRKFLDLSDNEIFKGLHYKGKPKTAKKREATLFDPNEPTELEFDKVEAEKKAWISLRGAAKLREALGNEFYGRFVALGKHADEATKILTYYKDEGQKRRELTKLPLEAEMVERLVKIGFSDFLKLSLKAIRDILPAMESGARYDEAVLMLGVPHKEKSAILPPLNKTDIDILNPTVIRAFAQFRKVANALVRKYGAFDRVHFELAREINTKGEIEDIKESQRKNEKERKEAADWIAETSFQVPLTRKNILKKRLYIQQDGRCAYTGDVIELERLFDEGYCEIDHILPRSRSADDSFANKVLCLARANQQKTDRTPYEWFGHDAARWNAFETRTSAPSNRVRTGKGKIDRLLKKNFDENSEMAFKDRNLNDTRYMARAIKTYCEQYWVFKNSHTKAPVQVRSGKLTSVLRYQWGLESKDRESHTHHAVDAIIIAFSTQGMVQKLSEYYRFKETHREKERPKLAVPLANFRDAVEEATRIENTETVKEGVEVKRLLISRPPRARVTGQAHEQTAKPYPRIKQVKNKKKWRLAPIDEEKFESFKADRVASANQKNFYETSTIPRVDVYHKKGKFHLVPIYLHEMVLNELPNLSLGTNPEAMDENFFKFSIFKDDLISIQTQGTPKKPAKIIMGYFKNMHGANMVLSSINNSPCEGFTCTPVSMDKKHKDKCKLCPEENRIAGRCLQGFLDYWSQEGLRPPRKEFECDQGVKFALDVKKYQIDPLGYYYEVKQEKRLGTIPQMRSAKKLVKK

SEQ ID NO: 384 - protein, 1269 aa, Mycoplasma gallisepticum
MNNSIKSKPEVTIGLDLGVGSVGWAIVDNETNIIHHLGSRLFSQAKTAEDRRSFRGVRRLIRRRKYKLKRFVNLIWKYNSYFGFKNKEDILNNYQEQQKLHNTVLNLKSEALNAKIDPKALSWILHDYLKNRGHFYEDNRDFNVYPTKELAKYFDKYGYYKGIIDSKEDNDNKLEEELTKYKFSNKHWLEEVKKVLSNQTGLPEKFKEEYESLFSYVRNYSEGPGSINSVSPYGIYHLDEKEGKVVQKYNNIWDKTIGKCNIFPDEYRAPKNSPIAMIFNEINELSTIRSYSIYLTGWFINQEFKKAYLNKLLDLLIKTNGEKPIDARQFKKLREETIAESIGKETLKDVENEEKLEKEDHKWKLKGLKLNTNGKIQYNDLSSLAKFVHKLKQHLKLDFLLEDQYATLDKINFLQSLFVYLGKHLRYSNRVDSANLKEFSDSNKLFERILQKQKDGLFKLFEQTDKDDEKILAQTHSLSTKAMLLAITRMTNLDNDEDNQKNNDKGWNFEAIKNFDQKFIDITKKNNNLSLKQNKRYLDDRFINDAILSPGVKRILREATKVFNAILKQFSEEYDVTKVVIELARELSEEKELENTKNYKKLIKKNGDKISEGLKALGISEDEIKDILKSPTKSYKFLLWLQQDHIDPYSLKEIAFDDIFTKTEKFEIDHIIPYSISFDDSSSNKLLVLAESNQAKSNQTPYEFISSGNAGIKWEDYEAYCRKFKDGDSSLLDSTQRSKKFAKMMKTDTSSKYDIGFLARNLNDTRYATIVFRDALEDYANNHLVEDKPMFKVVCINGSVTSFLRKNFDDSSYAKKDRDKNIHHAVDASIISIFSNETKTLFNQLTQFADYKLFKNTDGSWKKIDPKTGVVTEVTDENWKQIRVRNQVSEIAKVIEKYIQDSNIERKARYSRKIENKTNISLFNDTVYSAKKVGYEDQIKRKNLKTLDIHESAKENKNSKVKRQFVYRKLVNVSLLNNDKLADLFAEKEDILMYRANPWVINLAEQIFNEYTENKKIKSQNVFEKYMLDLTKEFPEKFSEFLVKSMLRNKTAIIYDDKKNIVHRIKRLKMLSSELKENKLSNVIIRSKNQSGTKLSYQDTINSLALMIMRSIDPTAKKQYIRVPLNTLNLHLGDHDFDLHNMDAYLKKPKFVKYLKANEIGDEYKPWRVLTSGTLLIHKKDKKLMYISSFQNLNDVIEIKNLIETEYKENDDSDSKKKKKANRFLMTLSTILNDYILLDAKDNFDILGLSKNRIDEILNSKLGLDKIVK

SEQ ID NO: 385 - protein, 1138 aa, Acidothermus cellulolyticus
MGGSEVGTVPVTWRLGVDVGERSIGLAAVSYEEDKPKEILAAVSWIHDGGVGDERSGASRLALRGMARRARRLRRFRRARLRDLDMLLSELGWTPLPDKNVSPVDAWLARKRLAEEYVVDETERRRLLGYAVSHMARHRGWRNPWTTIKDLKNLPQPSDSWERTRESLEARYSVSLEPGTVGQWAGYLLQRAPGIRLNPTQQSAGRRAELSNATAFETRLRQEDVLWELRCIADVQGLPEDVVSNVIDAVFCQKRPSVPAERIGRDPLDPSQLRASRACLEFQEYRIVAAVANLRIRDGSGSRPLSLEERNAVIEALLAQTERSLTWSDIALEILKLPNESDLTSVPEEDGPSSLAYSQFAPFDETSARIAEFIAKNRRKIPTFAQWWQEQDRTSRSDLVAALADNSIAGEEEQELLVHLPDAELEALEGLALPSGRVAYSRLTLSGLTRVMRDDGVDVHNARKTCFGVDDNWRPPLPALHEATGHPVVDRNLAILRKFLSSATMRWGPPQSIVVELARGASESRERQAEEEAARRAHRKANDRIRAELRASGLSDPSPADLVRARLLELYDCHCMYCGAPISWENSELDHIVPRTDGGSNRHENLAITCGACNKEKGRRPFASWAETSNRVQLRDVIDRVQKLKYSGNMYWTRDEFSRYKKSVVARLKRRTSDPEVIQSIESTGYAAVALRDRLLSYGEKNGVAQVAVFRGGVTAEARRWLDISIERLFSRVAIFAQSTSTKRLDRRHHAVDAVVLTTLTPGVAKTLADARSRRVSAEFWRRPSDVNRHSTEEPQSPAYRQWKESCSGLGDLLISTAARDSIAVAAPLRLRPTGALHEETLRAFSEHTVGAAWKGAELRRIVEPEVYAAFLALTDPGGRFLKVSPSEDVLPADENRHIVLSDRVLGPRDRVKLFPDDRGSIRVRGGAAYIASFHHARVFRWGSSHSPSFALLRVSLADLAVAGLLRDGVDVFTAELPPWTPAWRYASIALVKAVESGDAKQVGWLVPGDELDFGPEGVTTAAGDLSMFLKYFPERHWVVTGFEDDKRINLKPAFLSAEQAEVLRTERSDRPDTLTEAGEILAQFFPRCWRATVAKVLCHPGLTVIRRTALGQPRWRRGHLPYSWRPWSADPWSGGTP

SEQ ID NO: 386 - protein, 1265 aa, Mycoplasma ovipneumoniae
MHNKKNITIGFDLGIASIGWAIIDSTTSKILDWGTRTFEERKTANERRAFRSTRRNIRRKAYRNQRFINLILKYKDLFELKNISDIQRANKKDTENYEKIISFFTEIYKKCAAKHSNILEVKVKALDSKIEKLDLIWILHDYLENRGFFYDLEEENVADKYEGIEHPSILLYDFFKKNGFFKSNSSIPKDLGGYSFSNLQWVNEIKKLFEVQEINPEFSEKFLNLFTSVRDYAKGPGSEHSASEYGIFQKDEKGKVFKKYDNIWDKTIGKCSFFVEENRSPVNYPSYEIFNLLNQLINLSTDLKTTNKKIWQLSSNDRNELLDELLKVKEKAKIISISLKKNEIKKIILKDFGFEKSDIDDQDTIEGRKIIKEEPTTKLEVTKHLLATIYSHSSDSNWININNILEFLPYLDAICIILDREKSRGQDEVLKKLTEKNIFEVLKIDREKQLDFVKSIFSNTKFNFKKIGNFSLKAIREFLPKMFEQNKNSEYLKWKDEEIRRKWEEQKSKLGKTDKKTKYLNPRIFQDEIISPGTKNTFEQAVLVLNQIIKKYSKENIIDAIIIESPREKNDKKTIEEIKKRNKKGKGKTLEKLFQILNLENKGYKLSDLETKPAKLLDRLRFYHQQDGIDLYTLDKINIDQLINGSQKYEIEHIIPYSMSYDNSQANKILTEKAENLKKGKLIASEYIKRNGDEFYNKYYEKAKELFINKYKKNKKLDSYVDLDEDSAKNRFRFLTLQDYDEFQVEFLARNLNDTRYSTKLFYHALVEHFENNEFFTYIDENSSKHKVKISTIKGHVTKYFRAKPVQKNNGPNENLNNNKPEKIEKNRENNEHHAVDAAIVAIIGNKNPQIANLLTLADNKTDKKFLLHDENYKENIETGELVKIPKFEVDKLAKVEDLKKIIQEKYEEAKKHTAIKFSRKTRTILNGGLSDETLYGFKYDEKEDKYFKIIKKKLVTSKNEELKKYFENPFGKKADGKSEYTVLMAQSHLSEFNKLKEIFEKYNGFSNKTGNAFVEYMNDLALKEPTLKAEIESAKSVEKLLYYNFKPSDQFTYHDNINNKSFKRFYKNIRIIEYKSIPIKFKILSKHDGGKSFKDTLFSLYSLVYKVYENGKESYKSIPVTSQMRNFGIDEFDFLDENLYNKEKLDIYKSDFAKPIPVNCKPVFVLKKGSILKKKSLDIDDFKETKETEEGNYYFISTISKRFNRDTAYGLKPLKLSVVKPVAEPSTNPIFKEYIPIHLDELGNEYPVKIKEHTDDEKLMCTIK

SEQ ID NO: 387 - RNA, 20 nt, Artificial Sequence
  Synthetic
ccugccuccgcucuacucac

SEQ ID NO: 388 - RNA, 20 nt, Artificial Sequence
  Synthetic
gcugccgcccagugggacuu

SEQ ID NO: 389 - RNA, 20 nt, Artificial Sequence
  Synthetic
acaaugugucaacucuugac

SEQ ID NO: 390 - RNA, 20 nt, Artificial Sequence
  Synthetic
ggugacaagugugaucacuu

SEQ ID NO: 391 - RNA, 20 nt, Artificial Sequence
  Synthetic
ccagguaccuaucgauuguc

SEQ ID NO: 392 - RNA, 20 nt, Artificial Sequence
  Synthetic
cuucacauugauuuuuuggc

SEQ ID NO: 393 - RNA, 20 nt, Artificial Sequence
  Synthetic
gcagcauagugagcccagaa

SEQ ID NO: 394 - RNA, 20 nt, Artificial Sequence
  Synthetic
gguaccuaucgauugucagg

SEQ ID NO: 395 - RNA, 20 nt, Artificial Sequence
  Synthetic
gugaguagagcggaggcagg

SEQ ID NO: 396 - RNA, 17 nt, Artificial Sequence
  Synthetic
gccuccgcucuacucac

SEQ ID NO: 397 - RNA, 17 nt, Artificial Sequence
  Synthetic
gccgcccagugggacuu

SEQ ID NO: 398 - RNA, 17 nt, Artificial Sequence
  Synthetic
augugucaacucuugac

SEQ ID NO: 399 - RNA, 17 nt, Artificial Sequence
  Synthetic
gacaaucgauagguacc

SEQ ID NO: 400 - RNA, 17 nt, Artificial Sequence
  Synthetic
cacauugauuuuuuggc

SEQ ID NO: 401 - RNA, 17 nt, Artificial Sequence
  Synthetic
gcauagugagcccagaa

SEQ ID NO: 402 - RNA, 17 nt, Artificial Sequence
  Synthetic
gguaccuaucgauuguc

SEQ ID NO: 403 - RNA, 17 nt, Artificial Sequence
  Synthetic
gaaaaacaggucagaga

SEQ ID NO: 404 - RNA, 17 nt, Artificial Sequence
  Synthetic
gacaagugugaucacuu

SEQ ID NO: 405 - RNA, 20 nt, Artificial Sequence
  Synthetic
gacaagugugaucacuuggg

SEQ ID NO: 406 - RNA, 17 nt, Artificial Sequence
  Synthetic
gacggucaccuuugggg

SEQ ID NO: 407 - RNA, 17 nt, Artificial Sequence
  Synthetic
gagcggaggcaggaggc

SEQ ID NO: 408 - RNA, 17 nt, Artificial Sequence
  Synthetic
gccaggacggucaccuu

SEQ ID NO: 409 - RNA, 17 nt, Artificial Sequence
  Synthetic
gccuuuugcaguuuauc

SEQ ID NO: 410 - RNA, 20 nt, Artificial Sequence
  Synthetic
gcuguguuugcgucucuccc

SEQ ID NO: 411 - RNA, 17 nt, Artificial Sequence
  Synthetic
gcuucacauugauuuuu

SEQ ID NO: 412 - RNA, 20 nt, Artificial Sequence
  Synthetic
ggacaguaagaaggaaaaac

SEQ ID NO: 413 - RNA, 20 nt, Artificial Sequence
  Synthetic
ggcagcauagugagcccaga

SEQ ID NO: 414 - RNA, 20 nt, Artificial Sequence
  Synthetic
gguguucaucuuugguuuug

SEQ ID NO: 415 - RNA, 20 nt, Artificial Sequence
  Synthetic
guagagcggaggcaggaggc

SEQ ID NO: 416 - RNA, 17 nt, Artificial Sequence
  Synthetic
gugaguagagcggaggc

SEQ ID NO: 417 - RNA, 20 nt, Artificial Sequence
  Synthetic
guguucaucuuugguuuugu

SEQ ID NO: 418 - RNA, 17 nt, Artificial Sequence
  Synthetic
guguuugcgucucuccc

SEQ ID NO: 419 - RNA, 17 nt, Artificial Sequence
  Synthetic
guucaucuuugguuuug

SEQ ID NO: 420 - RNA, 20 nt, Artificial Sequence
  Synthetic
guuugcuuuaaaagccagga

SEQ ID NO: 421 - RNA, 20 nt, Artificial Sequence
  Synthetic
aaaacaggucagagauggcc

SEQ ID NO: 422 - RNA, 20 nt, Artificial Sequence
  Synthetic
aaagccaggacggucaccuu

SEQ ID NO: 423 - RNA, 17 nt, Artificial Sequence
  Synthetic
aacaccagugaguagag

SEQ ID NO: 424 - RNA, 20 nt, Artificial Sequence
  Synthetic
aacaccagugaguagagcgg

SEQ ID NO: 425 - RNA, 20 nt, Artificial Sequence
  Synthetic
aagccaggacggucaccuuu

SEQ ID NO: 426 - RNA, 20 nt, Artificial Sequence
  Synthetic
aaggaaaaacaggucagaga

SEQ ID NO: 427 - RNA, 17 nt, Artificial Sequence
  Synthetic
aagugugaucacuuggg

SEQ ID NO: 428 - RNA, 20 nt, Artificial Sequence
  Synthetic
aagugugaucacuugggugg

SEQ ID NO: 429 - RNA, 20 nt, Artificial Sequence
  Synthetic
acacagcauggacgacagcc

SEQ ID NO: 430 - RNA, 17 nt, Artificial Sequence
  Synthetic
acagggcucuauuuuau

SEQ ID NO: 431 - RNA, 17 nt, Artificial Sequence
  Synthetic
acaggucagagauggcc

SEQ ID NO: 432 - RNA, 17 nt, Artificial Sequence
  Synthetic
acauugauuuuuuggca

SEQ ID NO: 433 - RNA, 17 nt, Artificial Sequence
  Synthetic
accagugaguagagcgg

SEQ ID NO: 434 - RNA, 17 nt, Artificial Sequence
  Synthetic
accuaucgauugucagg

SEQ ID NO: 435 - RNA, 17 nt, Artificial Sequence
  Synthetic
acuaugcugccgcccag

SEQ ID NO: 436 - RNA, 17 nt, Artificial Sequence
  Synthetic
acuugucaccaccccaa

SEQ ID NO: 437 - RNA, 17 nt, Artificial Sequence
  Synthetic
agaaggggacaguaaga

SEQ ID NO: 438 - RNA, 17 nt, Artificial Sequence
  Synthetic
agagcggaggcaggagg

SEQ ID NO: 439 - RNA, 17 nt, Artificial Sequence
  Synthetic
agauggccagguugagc

SEQ ID NO: 440 - RNA, 17 nt, Artificial Sequence
  Synthetic
agcauagugagcccaga

SEQ ID NO: 441 - RNA, 20 nt, Artificial Sequence
  Synthetic
agccaggacggucaccuuug

SEQ ID NO: 442 - RNA, 17 nt, Artificial Sequence
  Synthetic
aguagagcggaggcagg

SEQ ID NO: 443 - RNA, 20 nt, Artificial Sequence
  Synthetic
aguagagcggaggcaggagg

SEQ ID NO: 444 - RNA, 20 nt, Artificial Sequence
  Synthetic
augaacaccagugaguagag

SEQ ID NO: 445 - RNA, 17 nt, Artificial Sequence
  Synthetic
auuuccaaagucccacu

SEQ ID NO: 446 - RNA, 20 nt, Artificial Sequence
  Synthetic
auuuccaaagucccacuggg

SEQ ID NO: 447 - RNA, 20 nt, Artificial Sequence
  Synthetic
caaugugucaacucuugaca

SEQ ID NO: 448 - RNA, 20 nt, Artificial Sequence
  Synthetic
cacacuugucaccaccccaa

SEQ ID NO: 449 - RNA, 20 nt, Artificial Sequence
  Synthetic
caccccaaaggugaccgucc

SEQ ID NO: 450 - RNA, 20 nt, Artificial Sequence
  Synthetic
cagagauggccagguugagc

SEQ ID NO: 451 - RNA, 20 nt, Artificial Sequence
  Synthetic
cagcauagugagcccagaag

SEQ ID NO: 452 - RNA, 17 nt, Artificial Sequence
  Synthetic
cagcauggacgacagcc

SEQ ID NO: 453 - RNA, 17 nt, Artificial Sequence
  Synthetic
caggacggucaccuuug

SEQ ID NO: 454 - RNA, 20 nt, Artificial Sequence
  Synthetic
caggacggucaccuuugggg

SEQ ID NO: 455 - RNA, 17 nt, Artificial Sequence
  Synthetic
caguaagaaggaaaaac

SEQ ID NO: 456 - RNA, 17 nt, Artificial Sequence
  Synthetic
cauagugagcccagaag

SEQ ID NO: 457 - RNA, 17 nt, Artificial Sequence
  Synthetic
caucaauuauuauacau

SEQ ID NO: 458 - RNA, 17 nt, Artificial Sequence
  Synthetic
caucuaccugcucaacc

SEQ ID NO: 459 - RNA, 17 nt, Artificial Sequence
  Synthetic
ccaggacggucaccuuu

SEQ ID NO: 460 - RNA, 20 nt, Artificial Sequence
  Synthetic
ccagugaguagagcggaggc

SEQ ID NO: 461 - RNA, 17 nt, Artificial Sequence
  Synthetic
cccaaaggugaccgucc

SEQ ID NO: 462 - RNA, 20 nt, Artificial Sequence
  Synthetic
cccagaaggggacaguaaga

SEQ ID NO: 463 - RNA, 20 nt, Artificial Sequence
  Synthetic
ccugacaaucgauagguacc

SEQ ID NO: 464 - RNA, 20 nt, Artificial Sequence
  Synthetic
ccuucuuacuguccccuucu

SEQ ID NO: 465 - RNA, 17 nt, Artificial Sequence
  Synthetic
cuaugcugccgcccagu

SEQ ID NO: 466 - RNA, 20 nt, Artificial Sequence
  Synthetic
cucacuaugcugccgcccag

SEQ ID NO: 467 - RNA, 20 nt, Artificial Sequence
  Synthetic
cuguguuugcuuuaaaagcc

SEQ ID NO: 468 - RNA, 20 nt, Artificial Sequence
  Synthetic
cuuuuaaagcaaacacagca

SEQ ID NO: 469 - RNA, 20 nt, Artificial Sequence
  Synthetic
uaauaauugaugucauagau

SEQ ID NO: 470 - RNA, 17 nt, Artificial Sequence
  Synthetic
uaauugaugucauagau

SEQ ID NO: 471 - RNA, 20 nt, Artificial Sequence
  Synthetic
uacucacugguguucaucuu

SEQ ID NO: 472 - RNA, 17 nt, Artificial Sequence
  Synthetic
uauuuccaaagucccac

SEQ ID NO: 473 - RNA, 20 nt, Artificial Sequence
  Synthetic
uauuuuauaggcuucuucuc

SEQ ID NO: 474 - RNA, 20 nt, Artificial Sequence
  Synthetic
ucacuaugcugccgcccagu

SEQ ID NO: 475 - RNA, 17 nt, Artificial Sequence
  Synthetic
ucacugguguucaucuu

SEQ ID NO: 476 - RNA, 20 nt, Artificial Sequence
  Synthetic
ucagccuuuugcaguuuauc

SEQ ID NO: 477 - RNA, 20 nt, Artificial Sequence
  Synthetic
ucauccuccugacaaucgau

SEQ ID NO: 478 - RNA, 20 nt, Artificial Sequence
  Synthetic
ucauccugauaaacugcaaa

SEQ ID NO: 479 - RNA, 17 nt, Artificial Sequence
  Synthetic
uccaaagucccacuggg

SEQ ID NO: 480 - RNA, 17 nt, Artificial Sequence
  Synthetic
uccuccugacaaucgau

SEQ ID NO: 481 - RNA, 17 nt, Artificial Sequence
  Synthetic
uccugauaaacugcaaa

SEQ ID NO: 482 - RNA, 20 nt, Artificial Sequence
  Synthetic
uccuucuuacuguccccuuc

SEQ ID NO: 483 - RNA, 17 nt, Artificial Sequence
  Synthetic
ucuuacuguccccuucu

SEQ ID NO: 484 - RNA, 17 nt, Artificial Sequence
  Synthetic
ugacaagugugaucacu

SEQ ID NO: 485 - RNA, 20 nt, Artificial Sequence
  Synthetic
ugacaucaauuauuauacau

SEQ ID NO: 486 - RNA, 20 nt, Artificial Sequence
  Synthetic
ugacaucuaccugcucaacc

SEQ ID NO: 487 - RNA, 17 nt, Artificial Sequence
  Synthetic
ugcaguuuaucaggaug

SEQ ID NO: 488 - RNA, 17 nt, Artificial Sequence
  Synthetic
ugcuuuaaaagccagga

SEQ ID NO: 489 - RNA, 20 nt, Artificial Sequence
  Synthetic
uggugacaagugugaucacu

SEQ ID NO: 490 - RNA, 20 nt, Artificial Sequence
  Synthetic
ugguuuugugggcaacaugc

SEQ ID NO: 491 - RNA, 20 nt, Artificial Sequence
  Synthetic
uguauuuccaaagucccacu

SEQ ID NO: 492 - RNA, 17 nt, Artificial Sequence
  Synthetic
ugugaucacuugggugg

SEQ ID NO: 493 - RNA, 17 nt, Artificial Sequence
  Synthetic
ugugucaacucuugaca

SEQ ID NO: 494 - RNA, 17 nt, Artificial Sequence
  Synthetic
uguuugcuuuaaaagcc

SEQ ID NO: 495 - RNA, 17 nt, Artificial Sequence
  Synthetic
uuaaagcaaacacagca

SEQ ID NO: 496 - RNA, 20 nt, Artificial Sequence
  Synthetic
uucacauugauuuuuuggca

SEQ ID NO: 497 - RNA, 17 nt, Artificial Sequence
  Synthetic
uucaucuuugguuuugu

SEQ ID NO: 498 - RNA, 17 nt, Artificial Sequence
  Synthetic
uucuuacuguccccuuc

SEQ ID NO: 499 - RNA, 20 nt, Artificial Sequence
  Synthetic
uugacagggcucuauuuuau

SEQ ID NO: 500 - RNA, 20 nt, Artificial Sequence
  Synthetic
uuguauuuccaaagucccac

SEQ ID NO: 501 - RNA, 17 nt, Artificial Sequence
  Synthetic
uuuauaggcuucuucuc

SEQ ID NO: 502 - RNA, 20 nt, Artificial Sequence
  Synthetic
uuugcuucacauugauuuuu

SEQ ID NO: 503 - RNA, 20 nt, Artificial Sequence
  Synthetic
uuuugcaguuuaucaggaug

SEQ ID NO: 504 - RNA, 17 nt, Artificial Sequence
  Synthetic
uuuugugggcaacaugc

SEQ ID NO: 505 - RNA, 20 nt, Artificial Sequence
  Synthetic
cauacagucaguaucaauuc

SEQ ID NO: 506 - RNA, 20 nt, Artificial Sequence
  Synthetic
gacauuaaagauagucaucu

SEQ ID NO: 507 - RNA, 20 nt, Artificial Sequence
  Synthetic
acauuaaagauagucaucuu

SEQ ID NO: 508 - RNA, 20 nt, Artificial Sequence
  Synthetic
cauuaaagauagucaucuug

SEQ ID NO: 509 - RNA, 20 nt, Artificial Sequence
  Synthetic
aaagauagucaucuuggggc

SEQ ID NO: 510 - RNA, 20 nt, Artificial Sequence
  Synthetic
gguccugccgcugcuuguca

SEQ ID NO: 511 - RNA, 20 nt, Artificial Sequence
  Synthetic
ugucauggucaucugcuacu

SEQ ID NO: 512 - RNA, 20 nt, Artificial Sequence
  Synthetic
gucauggucaucugcuacuc

SEQ ID NO: 513 - RNA, 20 nt, Artificial Sequence
  Synthetic
gaauccuaaaaacucugcuu

SEQ ID NO: 514 - RNA, 20 nt, Artificial Sequence
  Synthetic
ggugucgaaaugagaagaag

SEQ ID NO: 515 - RNA, 20 nt, Artificial Sequence
  Synthetic
gaaaugagaagaagaggcac

SEQ ID NO: 516 - RNA, 20 nt, Artificial Sequence
  Synthetic
aaaugagaagaagaggcaca

SEQ ID NO: 517 - RNA, 20 nt, Artificial Sequence
  Synthetic
agaagaggcacagggcugug

SEQ ID NO: 518 - RNA, 20 nt, Artificial Sequence
  Synthetic
ugauuguuuauuuucucuuc

SEQ ID NO: 519 - RNA, 20 nt, Artificial Sequence
  Synthetic
gauuguuuauuuucucuucu

SEQ ID NO: 520 - RNA, 20 nt, Artificial Sequence
  Synthetic
ccuucuccugaacaccuucc

SEQ ID NO: 521 - RNA, 20 nt, Artificial Sequence
  Synthetic
aacaccuuccaggaauucuu

SEQ ID NO: 522 - RNA, 20 nt, Artificial Sequence
  Synthetic
auaauugcaguagcucuaac

SEQ ID NO: 523 - RNA, 20 nt, Artificial Sequence
  Synthetic
uugcaguagcucuaacaggu

SEQ ID NO: 524 - RNA, 20 nt, Artificial Sequence
  Synthetic
cagguuggaccaagcuaugc

SEQ ID NO: 525 - RNA, 20 nt, Artificial Sequence
  Synthetic
augcaggugacagagacucu

SEQ ID NO: 526 - RNA, 20 nt, Artificial Sequence
  Synthetic
ugcaggugacagagacucuu

SEQ ID NO: 527 - RNA, 20 nt, Artificial Sequence
  Synthetic
cccaucaucuaugccuuugu

SEQ ID NO: 528 - RNA, 20 nt, Artificial Sequence
  Synthetic
ccaucaucuaugccuuuguc

SEQ ID NO: 529 - RNA, 20 nt, Artificial Sequence
  Synthetic
caucaucuaugccuuugucg

SEQ ID NO: 530 - RNA, 20 nt, Artificial Sequence
  Synthetic
cuguucuauuuuccagcaag

SEQ ID NO: 531 - RNA, 20 nt, Artificial Sequence
  Synthetic
ucaguuuacacccgauccac

SEQ ID NO: 532 - RNA, 20 nt, Artificial Sequence
  Synthetic
caguuuacacccgauccacu

SEQ ID NO: 533 - RNA, 20 nt, Artificial Sequence
  Synthetic
aguuuacacccgauccacug

SEQ ID NO: 534 - RNA, 20 nt, Artificial Sequence
  Synthetic
cacccgauccacuggggagc

SEQ ID NO: 535 - RNA, 20 nt, Artificial Sequence
  Synthetic
uggggagcaggaaauaucug

SEQ ID NO: 536 - RNA, 20 nt, Artificial Sequence
  Synthetic
ggggagcaggaaauaucugu

SEQ ID NO: 537 - RNA, 20 nt, Artificial Sequence
  Synthetic
auaucugugggcuugugaca

SEQ ID NO: 538 - RNA, 20 nt, Artificial Sequence
  Synthetic
gcuugugacacggacucaag

SEQ ID NO: 539 - RNA, 20 nt, Artificial Sequence
  Synthetic
cuugugacacggacucaagu

SEQ ID NO: 540 - RNA, 20 nt, Artificial Sequence
  Synthetic
ugacacggacucaagugggc

SEQ ID NO: 541 - RNA, 20 nt, Artificial Sequence
  Synthetic
cccagucagaguugugcaca

SEQ ID NO: 542 - RNA, 20 nt, Artificial Sequence
  Synthetic
cuuaguuuucauacacagcc

SEQ ID NO: 543 - RNA, 20 nt, Artificial Sequence
  Synthetic
uuaguuuucauacacagccu

SEQ ID NO: 544 - RNA, 20 nt, Artificial Sequence
  Synthetic
uuuucauacacagccugggc

SEQ ID NO: 545 - RNA, 20 nt, Artificial Sequence
  Synthetic
uuucauacacagccugggcu

SEQ ID NO: 546 - RNA, 20 nt, Artificial Sequence
  Synthetic
uucauacacagccugggcug

SEQ ID NO: 547 - RNA, 20 nt, Artificial Sequence
  Synthetic
ucauacacagccugggcugg

SEQ ID NO: 548 - RNA, 20 nt, Artificial Sequence
  Synthetic
uacacagccugggcuggggg

SEQ ID NO: 549 - RNA, 20 nt, Artificial Sequence
  Synthetic
acacagccugggcugggggu

SEQ ID NO: 550 - RNA, 20 nt, Artificial Sequence
  Synthetic
cacagccugggcugggggug

SEQ ID NO: 551 - RNA, 20 nt, Artificial Sequence
  Synthetic
agccugggcugggggugggg

SEQ ID NO: 552 - RNA, 20 nt, Artificial Sequence
  Synthetic
gccugggcuggggguggggu

SEQ ID NO: 553 - RNA, 20 nt, Artificial Sequence
  Synthetic
ggcuggggguggggugggag

SEQ ID NO: 554 - RNA, 20 nt, Artificial Sequence
  Synthetic
ugggagaggucuuuuuuaaa

SEQ ID NO: 555 - RNA, 20 nt, Artificial Sequence
  Synthetic
aaaggaaguuacuguuauag

SEQ ID NO: 556 - RNA, 20 nt, Artificial Sequence
  Synthetic
aaggaaguuacuguuauaga

SEQ ID NO: 557 - RNA, 20 nt, Artificial Sequence
  Synthetic
cuaagauucauccauuuauu

SEQ ID NO: 558 - RNA, 20 nt, Artificial Sequence
  Synthetic
acaacuuuuuaccuaguaca

SEQ ID NO: 559 - RNA, 20 nt, Artificial Sequence
  Synthetic
ccuaguacaaggcaacauau

SEQ ID NO: 560 - RNA, 20 nt, Artificial Sequence
  Synthetic
guuguaaauguguuuaaaac

SEQ ID NO: 561 - RNA, 20 nt, Artificial Sequence
  Synthetic
aacaggucuuugucuugcua

SEQ ID NO: 562 - RNA, 20 nt, Artificial Sequence
  Synthetic
acaggucuuugucuugcuau

SEQ ID NO: 563 - RNA, 20 nt, Artificial Sequence
  Synthetic
caggucuuugucuugcuaug

SEQ ID NO: 564 - RNA, 20 nt, Artificial Sequence
  Synthetic
caugugugauuuccccucca

SEQ ID NO: 565 - RNA, 20 nt, Artificial Sequence
  Synthetic
gugauuuccccuccaaggua

SEQ ID NO: 566 - RNA, 20 nt, Artificial Sequence
  Synthetic
aguuucacugacuuagaacc

SEQ ID NO: 567 - RNA, 20 nt, Artificial Sequence
  Synthetic
agaaccaggcgagagacuug

SEQ ID NO: 568 - RNA, 20 nt, Artificial Sequence
  Synthetic
caggcgagagacuuguggcc

SEQ ID NO: 569 - RNA, 20 nt, Artificial Sequence
  Synthetic
aggcgagagacuuguggccu

SEQ ID NO: 570 - RNA, 20 nt, Artificial Sequence
  Synthetic
gacuuguggccugggagagc

SEQ ID NO: 571 - RNA, 20 nt, Artificial Sequence
  Synthetic
acuuguggccugggagagcu

SEQ ID NO: 572 - RNA, 20 nt, Artificial Sequence
  Synthetic
cuuguggccugggagagcug

SEQ ID NO: 573 - RNA, 20 nt, Artificial Sequence
  Synthetic
gggaagcuucuuaaaugaga

SEQ ID NO: 574 - RNA, 20 nt, Artificial Sequence
  Synthetic
aaaugagaaggaauuugagu

SEQ ID NO: 575 - RNA, 20 nt, Artificial Sequence
  Synthetic
ugaguuggaucaucuauugc

SEQ ID NO: 576 - RNA, 20 nt, Artificial Sequence
  Synthetic
gccucacugcaagcacugca

SEQ ID NO: 577 - RNA, 20 nt, Artificial Sequence
  Synthetic
ccucacugcaagcacugcau

SEQ ID NO: 578 - RNA, 20 nt, Artificial Sequence
  Synthetic
aagcacugcaugggcaagcu

SEQ ID NO: 579 - RNA, 20 nt, Artificial Sequence
  Synthetic
ugggcaagcuuggcuguaga

SEQ ID NO: 580 - RNA, 20 nt, Artificial Sequence
  Synthetic
gcuguagaaggagacagagc

SEQ ID NO: 581 - RNA, 20 nt, Artificial Sequence
  Synthetic
uagaaggagacagagcuggu

SEQ ID NO: 582 - RNA, 20 nt, Artificial Sequence
  Synthetic
agaaggagacagagcugguu

SEQ ID NO: 583 - RNA, 20 nt, Artificial Sequence
  Synthetic
cagagcugguugggaagaca

SEQ ID NO: 584 - RNA, 20 nt, Artificial Sequence
  Synthetic
agagcugguugggaagacau

SEQ ID NO: 585 - RNA, 20 nt, Artificial Sequence
  Synthetic
gagcugguugggaagacaug

SEQ ID NO: 586 - RNA, 20 nt, Artificial Sequence
  Synthetic
cugguugggaagacaugggg

SEQ ID NO: 587 - RNA, 20 nt, Artificial Sequence
  Synthetic
uugggaagacauggggagga

SEQ ID NO: 588 - RNA, 20 nt, Artificial Sequence
  Synthetic
agacauggggaggaaggaca

SEQ ID NO: 589 - RNA, 20 nt, Artificial Sequence
  Synthetic
uagaucaugaagaaccuuga

SEQ ID NO: 590 - RNA, 20 nt, Artificial Sequence
  Synthetic
gucuaagucaugagcugagc

SEQ ID NO: 591 - RNA, 20 nt, Artificial Sequence
  Synthetic
ucuaagucaugagcugagca

SEQ ID NO: 592 - RNA, 20 nt, Artificial Sequence
  Synthetic
ugagcugagcagggagaucc

SEQ ID NO: 593 - RNA, 20 nt, Artificial Sequence
  Synthetic
cugagcagggagauccuggu

SEQ ID NO: 594 - RNA, 20 nt, Artificial Sequence
  Synthetic
auccugguugguguugcaga

SEQ ID NO: 595 - RNA, 20 nt, Artificial Sequence
  Synthetic
guugcagaagguuuacucug

SEQ ID NO: 596 - RNA, 20 nt, Artificial Sequence
  Synthetic
aagguuuacucuguggccaa

SEQ ID NO: 597 - RNA, 20 nt, Artificial Sequence
  Synthetic
guuuacucuguggccaaagg

SEQ ID NO: 598 - RNA, 20 nt, Artificial Sequence
  Synthetic
uuuacucuguggccaaagga

SEQ ID NO: 599 - RNA, 20 nt, Artificial Sequence
  Synthetic
ucuguggccaaaggaggguc

SEQ ID NO: 600 - RNA, 20 nt, Artificial Sequence
  Synthetic
uggccaaaggagggucagga

SEQ ID NO: 601 - RNA, 20 nt, Artificial Sequence
  Synthetic
gucaggaaggaugagcauuu

SEQ ID NO: 602 - RNA, 20 nt, Artificial Sequence
  Synthetic
ucaggaaggaugagcauuua

SEQ ID NO: 603 - RNA, 20 nt, Artificial Sequence
  Synthetic
aaggaugagcauuuagggca

SEQ ID NO: 604 - RNA, 20 nt, Artificial Sequence
  Synthetic
ggagaccaccaacagcccuc

SEQ ID NO: 605 - RNA, 20 nt, Artificial Sequence
  Synthetic
ccaccaacagcccucagguc

SEQ ID NO: 606 - RNA, 20 nt, Artificial Sequence
  Synthetic
caccaacagcccucagguca

SEQ ID NO: 607 - RNA, 20 nt, Artificial Sequence
  Synthetic
acagcccucaggucagggug

SEQ ID NO: 608 - RNA, 20 nt, Artificial Sequence
  Synthetic
cccucaggucagggugagga

SEQ ID NO: 609 - RNA, 20 nt, Artificial Sequence
  Synthetic
gauggccucugcuaagcuca

SEQ ID NO: 610 - RNA, 20 nt, Artificial Sequence
  Synthetic
ucugcuaagcucaaggcgug

SEQ ID NO: 611 - RNA, 20 nt, Artificial Sequence
  Synthetic
cuaagcucaaggcgugagga

SEQ ID NO: 612 - RNA, 20 nt, Artificial Sequence
  Synthetic
uaagcucaaggcgugaggau

SEQ ID NO: 613 - RNA, 20 nt, Artificial Sequence
  Synthetic
cucaaggcgugaggauggga

SEQ ID NO: 614 - RNA, 20 nt, Artificial Sequence
  Synthetic
aaggcgugaggaugggaagg

SEQ ID NO: 615 - RNA, 20 nt, Artificial Sequence
  Synthetic
aggcgugaggaugggaagga

SEQ ID NO: 616 - RNA, 20 nt, Artificial Sequence
  Synthetic
cgugaggaugggaaggaggg

SEQ ID NO: 617 - RNA, 20 nt, Artificial Sequence
  Synthetic
gaaggagggagguauucgua

SEQ ID NO: 618 - RNA, 20 nt, Artificial Sequence
  Synthetic
gagggagguauucguaagga

SEQ ID NO: 619 - RNA, 20 nt, Artificial Sequence
  Synthetic
agggagguauucguaaggau

SEQ ID NO: 620 - RNA, 20 nt, Artificial Sequence
  Synthetic
agguauucguaaggauggga

SEQ ID NO: 621 - RNA, 20 nt, Artificial Sequence
  Synthetic
uauucguaaggaugggaagg

SEQ ID NO: 622 - RNA, 20 nt, Artificial Sequence
  Synthetic
auucguaaggaugggaagga

SEQ ID NO: 623 - RNA, 20 nt, Artificial Sequence
  Synthetic
cguaaggaugggaaggaggg

SEQ ID NO: 624 - RNA, 20 nt, Artificial Sequence
  Synthetic
agguauucgugcagcauaug

SEQ ID NO: 625 - RNA, 20 nt, Artificial Sequence
  Synthetic
ggaugcagagucagcagaac

SEQ ID NO: 626 - RNA, 20 nt, Artificial Sequence
  Synthetic
gaugcagagucagcagaacu

SEQ ID NO: 627 - RNA, 20 nt, Artificial Sequence
  Synthetic
augcagagucagcagaacug

SEQ ID NO: 628 - RNA, 20 nt, Artificial Sequence
  Synthetic
cagagucagcagaacugggg

SEQ ID NO: 629 - RNA, 20 nt, Artificial Sequence
  Synthetic
cagcagaacugggguggauu

SEQ ID NO: 630 - RNA, 20 nt, Artificial Sequence
  Synthetic
agcagaacugggguggauuu

SEQ ID NO: 631 - RNA, 20 nt, Artificial Sequence
  Synthetic
gaacugggguggauuugggu

SEQ ID NO: 632 - RNA, 20 nt, Artificial Sequence
  Synthetic
guggauuuggguuggaagug

SEQ ID NO: 633 - RNA, 20 nt, Artificial Sequence
  Synthetic
uggauuuggguuggaaguga

SEQ ID NO: 634 - RNA, 20 nt, Artificial Sequence
  Synthetic
guuggaagugagggucagag

SEQ ID NO: 635 - RNA, 20 nt, Artificial Sequence
  Synthetic
ucccuagucuucaagcagau

SEQ ID NO: 636 - RNA, 20 nt, Artificial Sequence
  Synthetic
gaaaagacaucaagcacaga

SEQ ID NO: 637 - RNA, 20 nt, Artificial Sequence
  Synthetic
aagacaucaagcacagaagg

SEQ ID NO: 638 - RNA, 20 nt, Artificial Sequence
  Synthetic
acaucaagcacagaaggagg

SEQ ID NO: 639 - RNA, 20 nt, Artificial Sequence
  Synthetic
ucaagcacagaaggaggagg

SEQ ID NO: 640 - RNA, 20 nt, Artificial Sequence
  Synthetic
agcacagaaggaggaggagg

SEQ ID NO: 641 - RNA, 20 nt, Artificial Sequence
  Synthetic
gaaggaggaggaggagguuu

SEQ ID NO: 642 - RNA, 20 nt, Artificial Sequence
  Synthetic
gguuuaggucaagaagaaga

SEQ ID NO: 643 - RNA, 20 nt, Artificial Sequence
  Synthetic
aggucaagaagaagauggau

SEQ ID NO: 644 - RNA, 20 nt, Artificial Sequence
  Synthetic
agaagauggauugguguaaa

SEQ ID NO: 645 - RNA, 20 nt, Artificial Sequence
  Synthetic
gauggauugguguaaaagga

SEQ ID NO: 646 - RNA, 20 nt, Artificial Sequence
  Synthetic
auggauugguguaaaaggau

SEQ ID NO: 647 - RNA, 20 nt, Artificial Sequence
  Synthetic
uugguguaaaaggauggguc

SEQ ID NO: 648 - RNA, 20 nt, Artificial Sequence
  Synthetic
cacagucucacccagacucc

SEQ ID NO: 649 - RNA, 20 nt, Artificial Sequence
  Synthetic
ccaucccagcugaaauacug

SEQ ID NO: 650 - RNA, 20 nt, Artificial Sequence
  Synthetic
caucccagcugaaauacuga

SEQ ID NO: 651 - RNA, 20 nt, Artificial Sequence
  Synthetic
aucccagcugaaauacugag

SEQ ID NO: 652 - RNA, 20 nt, Artificial Sequence
  Synthetic
ugaaauacugaggggucucc

SEQ ID NO: 653 - RNA, 20 nt, Artificial Sequence
  Synthetic
aauacugaggggucuccagg

SEQ ID NO: 654 - RNA, 20 nt, Artificial Sequence
  Synthetic
acuagauuuaugaauacacg

SEQ ID NO: 655 - RNA, 20 nt, Artificial Sequence
  Synthetic
uuaugaauacacgagguaug

SEQ ID NO: 656 - RNA, 20 nt, Artificial Sequence
  Synthetic
auacacgagguaugaggucu

SEQ ID NO: 657 - RNA, 20 nt, Artificial Sequence
  Synthetic
ucagcucacacaugagaucu

SEQ ID NO: 658 - RNA, 20 nt, Artificial Sequence
  Synthetic
ucacacaugagaucuaggug

SEQ ID NO: 659 - RNA, 20 nt, Artificial Sequence
  Synthetic
auuaccuaguagucauuuca

SEQ ID NO: 660 - RNA, 20 nt, Artificial Sequence
  Synthetic
uuaccuaguagucauuucau

SEQ ID NO: 661 - RNA, 20 nt, Artificial Sequence
  Synthetic
guagucauuucauggguugu

SEQ ID NO: 662 - RNA, 20 nt, Artificial Sequence
  Synthetic
uagucauuucauggguuguu

SEQ ID NO: 663 - RNA, 20 nt, Artificial Sequence
  Synthetic
ucauuucauggguuguuggg

SEQ ID NO: 664 - RNA, 20 nt, Artificial Sequence
  Synthetic
guuguugggaggauucuaug

SEQ ID NO: 665 - RNA, 20 nt, Artificial Sequence
  Synthetic
ggauucuaugaggcaaccac

SEQ ID NO: 666 - RNA, 20 nt, Artificial Sequence
  Synthetic
aaacucuuaguuacucauuc

SEQ ID NO: 667 - RNA, 20 nt, Artificial Sequence
  Synthetic
aacucuuaguuacucauuca

SEQ ID NO: 668 - RNA, 20 nt, Artificial Sequence
  Synthetic
cugagcaaagcauugagcaa

SEQ ID NO: 669 - RNA, 20 nt, Artificial Sequence
  Synthetic
ugagcaaagcauugagcaaa

SEQ ID NO: 670 - RNA, 20 nt, Artificial Sequence
  Synthetic
gagcaaagcauugagcaaag

SEQ ID NO: 671 - RNA, 20 nt, Artificial Sequence
  Synthetic
ugagcaaaggggucccauag

SEQ ID NO: 672 - RNA, 20 nt, Artificial Sequence
  Synthetic
aaaggggucccauagaggug

SEQ ID NO: 673 - RNA, 20 nt, Artificial Sequence
  Synthetic
aaggggucccauagagguga

SEQ ID NO: 674 - RNA, 20 nt, Artificial Sequence
  Synthetic
ugcccagugcacacaagugu

SEQ ID NO: 675 - RNA, 20 nt, Artificial Sequence
  Synthetic
uucugcauuuaaccgucaau

SEQ ID NO: 676 - RNA, 20 nt, Artificial Sequence
  Synthetic
auuuaaccgucaauaggcaa

SEQ ID NO: 677 - RNA, 20 nt, Artificial Sequence
  Synthetic
uuuaaccgucaauaggcaaa

SEQ ID NO: 678 - RNA, 20 nt, Artificial Sequence
  Synthetic
uuaaccgucaauaggcaaag

SEQ ID NO: 679 - RNA, 20 nt, Artificial Sequence
  Synthetic
uaaccgucaauaggcaaagg

SEQ ID NO: 680 - RNA, 20 nt, Artificial Sequence
  Synthetic
aaccgucaauaggcaaaggg

SEQ ID NO: 681 - RNA, 20 nt, Artificial Sequence
  Synthetic
gucaauaggcaaagggggga

SEQ ID NO: 682 - RNA, 20 nt, Artificial Sequence
  Synthetic
ucaauaggcaaaggggggaa

SEQ ID NO: 683 - RNA, 20 nt, Artificial Sequence
  Synthetic
ggggaagggacauauucauu

SEQ ID NO: 684 - RNA, 20 nt, Artificial Sequence
  Synthetic
ccuccguauuucagacugaa

SEQ ID NO: 685 - RNA, 20 nt, Artificial Sequence
  Synthetic
cuccguauuucagacugaau

SEQ ID NO: 686 - RNA, 20 nt, Artificial Sequence
  Synthetic
uccguauuucagacugaaug

SEQ ID NO: 687 - RNA, 20 nt, Artificial Sequence
  Synthetic
ccguauuucagacugaaugg

SEQ ID NO: 688 - RNA, 20 nt, Artificial Sequence
  Synthetic
uauuucagacugaauggggg

SEQ ID NO: 689 - RNA, 20 nt, Artificial Sequence
  Synthetic
auuucagacugaaugggggu

SEQ ID NO: 690 - RNA, 20 nt, Artificial Sequence
  Synthetic
uuucagacugaaugggggug

SEQ ID NO: 691 - RNA, 20 nt, Artificial Sequence
  Synthetic
uucagacugaaugggggugg

SEQ ID NO: 692 - RNA, 20 nt, Artificial Sequence
  Synthetic
ucagacugaauggggguggg

SEQ ID NO: 693 - RNA, 20 nt, Artificial Sequence
  Synthetic
cagacugaaugggggugggg

SEQ ID NO: 694 - RNA, 20 nt, Artificial Sequence
  Synthetic
agacugaauggggguggggg

SEQ ID NO: 695 - RNA, 20 nt, Artificial Sequence
  Synthetic
ggggguggggggggcgccuu

SEQ ID NO: 696 - RNA, 20 nt, Artificial Sequence
  Synthetic
ugaauauaccccuuaguguu

SEQ ID NO: 697 - RNA, 20 nt, Artificial Sequence
  Synthetic
gaauauaccccuuaguguuu

SEQ ID NO: 698 - RNA, 20 nt, Artificial Sequence
  Synthetic
uuuggguauauucauuucaa

SEQ ID NO: 699 - RNA, 20 nt, Artificial Sequence
  Synthetic
uuggguauauucauuucaaa

SEQ ID NO: 700 - RNA, 20 nt, Artificial Sequence
  Synthetic
cauuucaaagggagagagag

SEQ ID NO: 701 - RNA, 20 nt, Artificial Sequence
  Synthetic
acuugagacuguuuugaauu

SEQ ID NO: 702 - RNA, 20 nt, Artificial Sequence
  Synthetic
cuugagacuguuuugaauuu

SEQ ID NO: 703 - RNA, 20 nt, Artificial Sequence
  Synthetic
uugagacuguuuugaauuug

SEQ ID NO: 704 - RNA, 20 nt, Artificial Sequence
  Synthetic
ugagacuguuuugaauuugg

SEQ ID NO: 705 - RNA, 20 nt, Artificial Sequence
  Synthetic
acuguuuugaauuuggggga

SEQ ID NO: 706 - RNA, 20 nt, Artificial Sequence
  Synthetic
ggcuaaaaccaucauaguac

SEQ ID NO: 707 - RNA, 20 nt, Artificial Sequence
  Synthetic
aaaccaucauaguacaggua

SEQ ID NO: 708 - RNA, 20 nt, Artificial Sequence
  Synthetic
aucauaguacagguaaggug

SEQ ID NO: 709 - RNA, 20 nt, Artificial Sequence
  Synthetic
ucauaguacagguaagguga

SEQ ID NO: 710 - RNA, 20 nt, Artificial Sequence
  Synthetic
uaaggugagggaauaguaag

SEQ ID NO: 711 - RNA, 20 nt, Artificial Sequence
  Synthetic
guaaguggugagaacuacuc

SEQ ID NO: 712 - RNA, 20 nt, Artificial Sequence
  Synthetic
uaaguggugagaacuacuca

SEQ ID NO: 713 - RNA, 20 nt, Artificial Sequence
  Synthetic
gagaacuacucagggaauga

SEQ ID NO: 714 - RNA, 20 nt, Artificial Sequence
  Synthetic
gaaggugucagaauaauaag

SEQ ID NO: 715 - RNA, 20 nt, Artificial Sequence
  Synthetic
ucucagccucugaauaugaa

SEQ ID NO: 716 - RNA, 20 nt, Artificial Sequence
  Synthetic
aauaugaacggugagcauug

SEQ ID NO: 717 - RNA, 20 nt, Artificial Sequence
  Synthetic
ugagcauuguggcugucagc

SEQ ID NO: 718 - RNA, 20 nt, Artificial Sequence
  Synthetic
cugucagcaggaagcaacga

SEQ ID NO: 719 - RNA, 20 nt, Artificial Sequence
  Synthetic
ugucagcaggaagcaacgaa

SEQ ID NO: 720 - RNA, 20 nt, Artificial Sequence
  Synthetic
uuccuuuugcucuuaaguug

SEQ ID NO: 721 - RNA, 20 nt, Artificial Sequence
  Synthetic
ggagagugcaacaguagcau

SEQ ID NO: 722 - RNA, 20 nt, Artificial Sequence
  Synthetic
uagcauaggacccuacccuc

SEQ ID NO: 723 - RNA, 20 nt, Artificial Sequence
  Synthetic
agcauaggacccuacccucu

SEQ ID NO: 724 - RNA, 17 nt, Artificial Sequence
  Synthetic
acagucaguaucaauuc

SEQ ID NO: 725 - RNA, 17 nt, Artificial Sequence
  Synthetic
auuaaagauagucaucu

SEQ ID NO: 726 - RNA, 17 nt, Artificial Sequence
  Synthetic
uuaaagauagucaucuu

SEQ ID NO: 727 - RNA, 17 nt, Artificial Sequence
  Synthetic
uaaagauagucaucuug

SEQ ID NO: 728 - RNA, 17 nt, Artificial Sequence
  Synthetic
gauagucaucuuggggc

SEQ ID NO: 729 - RNA, 17 nt, Artificial Sequence
  Synthetic
ccugccgcugcuuguca

SEQ ID NO: 730 - RNA, 17 nt, Artificial Sequence
  Synthetic
cauggucaucugcuacu

SEQ ID NO: 731 - RNA, 17 nt, Artificial Sequence
  Synthetic
auggucaucugcuacuc

SEQ ID NO: 732 - RNA, 17 nt, Artificial Sequence
  Synthetic
uccuaaaaacucugcuu

SEQ ID NO: 733 - RNA, 17 nt, Artificial Sequence
  Synthetic
gucgaaaugagaagaag

SEQ ID NO: 734 - RNA, 17 nt, Artificial Sequence
  Synthetic
augagaagaagaggcac

SEQ ID NO: 735 - RNA, 17 nt, Artificial Sequence
  Synthetic
ugagaagaagaggcaca

SEQ ID NO: 736 - RNA, 17 nt, Artificial Sequence
  Synthetic
agaggcacagggcugug

SEQ ID NO: 737 - RNA, 17 nt, Artificial Sequence
  Synthetic
uuguuuauuuucucuuc

SEQ ID NO: 738 - RNA, 17 nt, Artificial Sequence
  Synthetic
uguuuauuuucucuucu

SEQ ID NO: 739 - RNA, 17 nt, Artificial Sequence
  Synthetic
ucuccugaacaccuucc

SEQ ID NO: 740 - RNA, 17 nt, Artificial Sequence
  Synthetic
accuuccaggaauucuu

SEQ ID NO: 741 - RNA, 17 nt, Artificial Sequence
  Synthetic
auugcaguagcucuaac

SEQ ID NO: 742 - RNA, 17 nt, Artificial Sequence
  Synthetic
caguagcucuaacaggu

SEQ ID NO: 743 - RNA, 17 nt, Artificial Sequence
  Synthetic
guuggaccaagcuaugc

SEQ ID NO: 744 - RNA, 17 nt, Artificial Sequence
  Synthetic
caggugacagagacucu

SEQ ID NO: 745 - RNA, 17 nt, Artificial Sequence
  Synthetic
aggugacagagacucuu

SEQ ID NO: 746 - RNA, 17 nt, Artificial Sequence
  Synthetic
aucaucuaugccuuugu

SEQ ID NO: 747 - RNA, 17 nt, Artificial Sequence
  Synthetic
ucaucuaugccuuuguc

SEQ ID NO: 748 - RNA, 17 nt, Artificial Sequence
  Synthetic
caucuaugccuuugucg

SEQ ID NO: 749 - RNA, 17 nt, Artificial Sequence
  Synthetic
uucuauuuuccagcaag

SEQ ID NO: 750 - RNA, 17 nt, Artificial Sequence
  Synthetic
guuuacacccgauccac

SEQ ID NO: 751 - RNA, 17 nt, Artificial Sequence
  Synthetic
uuuacacccgauccacu

SEQ ID NO: 752 - RNA, 17 nt, Artificial Sequence
  Synthetic
uuacacccgauccacug

SEQ ID NO: 753 - RNA, 17 nt, Artificial Sequence
  Synthetic
ccgauccacuggggagc

SEQ ID NO: 754 - RNA, 17 nt, Artificial Sequence
  Synthetic
ggagcaggaaauaucug

SEQ ID NO: 755 - RNA, 17 nt, Artificial Sequence
  Synthetic
gagcaggaaauaucugu

SEQ ID NO: 756 - RNA, 17 nt, Artificial Sequence
  Synthetic
ucugugggcuugugaca

SEQ ID NO: 757 - RNA, 17 nt, Artificial Sequence
  Synthetic
ugugacacggacucaag

SEQ ID NO: 758 - RNA, 17 nt, Artificial Sequence
  Synthetic
gugacacggacucaagu

SEQ ID NO: 759 - RNA, 17 nt, Artificial Sequence
  Synthetic
cacggacucaagugggc

SEQ ID NO: 760 - RNA, 17 nt, Artificial Sequence
  Synthetic
agucagaguugugcaca

SEQ ID NO: 761 - RNA, 17 nt, Artificial Sequence
  Synthetic
aguuuucauacacagcc

SEQ ID NO: 762 - RNA, 17 nt, Artificial Sequence
  Synthetic
guuuucauacacagccu

SEQ ID NO: 763 - RNA, 17 nt, Artificial Sequence
  Synthetic
ucauacacagccugggc

SEQ ID NO: 764 - RNA, 17 nt, Artificial Sequence
  Synthetic
cauacacagccugggcu

SEQ ID NO: 765 - RNA, 17 nt, Artificial Sequence
  Synthetic
auacacagccugggcug

SEQ ID NO: 766 - RNA, 17 nt, Artificial Sequence
  Synthetic
uacacagccugggcugg

SEQ ID NO: 767 - RNA, 17 nt, Artificial Sequence
  Synthetic
acagccugggcuggggg

SEQ ID NO: 768 - RNA, 17 nt, Artificial Sequence
  Synthetic
cagccugggcugggggu

SEQ ID NO: 769 - RNA, 17 nt, Artificial Sequence
  Synthetic
agccugggcugggggug

SEQ ID NO: 770 - RNA, 17 nt, Artificial Sequence
  Synthetic
cugggcugggggugggg

SEQ ID NO: 771 - RNA, 17 nt, Artificial Sequence
  Synthetic
ugggcuggggguggggu

SEQ ID NO: 772 - RNA, 17 nt, Artificial Sequence
  Synthetic
uggggguggggugggag

SEQ ID NO: 773 - RNA, 17 nt, Artificial Sequence
  Synthetic
gagaggucuuuuuuaaa

SEQ ID NO: 774 - RNA, 17 nt, Artificial Sequence
  Synthetic
ggaaguuacuguuauag

SEQ ID NO: 775 - RNA, 17 nt, Artificial Sequence
  Synthetic
gaaguuacuguuauaga

SEQ ID NO: 776 - RNA, 17 nt, Artificial Sequence
  Synthetic
agauucauccauuuauu

SEQ ID NO: 777 - RNA, 17 nt, Artificial Sequence
  Synthetic
acuuuuuaccuaguaca

SEQ ID NO: 778 - RNA, 17 nt, Artificial Sequence
  Synthetic
aguacaaggcaacauau

SEQ ID NO: 779 - RNA, 17 nt, Artificial Sequence
  Synthetic
guaaauguguuuaaaac

SEQ ID NO: 780 - RNA, 17 nt, Artificial Sequence
  Synthetic
aggucuuugucuugcua

SEQ ID NO: 781 - RNA, 17 nt, Artificial Sequence
  Synthetic
ggucuuugucuugcuau

SEQ ID NO: 782 - RNA, 17 nt, Artificial Sequence
  Synthetic
gucuuugucuugcuaug

SEQ ID NO: 783 - RNA, 17 nt, Artificial Sequence
  Synthetic
gugugauuuccccucca

SEQ ID NO: 784 - RNA, 17 nt, Artificial Sequence
  Synthetic
auuuccccuccaaggua

SEQ ID NO: 785 - RNA, 17 nt, Artificial Sequence
  Synthetic
uucacugacuuagaacc

SEQ ID NO: 786 - RNA, 17 nt, Artificial Sequence
  Synthetic
accaggcgagagacuug

SEQ ID NO: 787 - RNA, 17 nt, Artificial Sequence
  Synthetic
gcgagagacuuguggcc

SEQ ID NO: 788 - RNA, 17 nt, Artificial Sequence
  Synthetic
cgagagacuuguggccu

SEQ ID NO: 789 - RNA, 17 nt, Artificial Sequence
  Synthetic
uuguggccugggagagc

SEQ ID NO: 790 - RNA, 17 nt, Artificial Sequence
  Synthetic
uguggccugggagagcu

SEQ ID NO: 791 - RNA, 17 nt, Artificial Sequence
  Synthetic
guggccugggagagcug

SEQ ID NO: 792 - RNA, 17 nt, Artificial Sequence
  Synthetic
aagcuucuuaaaugaga

SEQ ID NO: 793 - RNA, 17 nt, Artificial Sequence
  Synthetic
ugagaaggaauuugagu

SEQ ID NO: 794 - RNA, 17 nt, Artificial Sequence
  Synthetic
guuggaucaucuauugc

SEQ ID NO: 795 - RNA, 17 nt, Artificial Sequence
  Synthetic
ucacugcaagcacugca

SEQ ID NO: 796 - RNA, 17 nt, Artificial Sequence
  Synthetic
cacugcaagcacugcau

SEQ ID NO: 797 - RNA, 17 nt, Artificial Sequence
  Synthetic
cacugcaugggcaagcu

SEQ ID NO: 798 - RNA, 17 nt, Artificial Sequence
  Synthetic
gcaagcuuggcuguaga

SEQ ID NO: 799 - RNA, 17 nt, Artificial Sequence
  Synthetic
guagaaggagacagagc

SEQ ID NO: 800 - RNA, 17 nt, Artificial Sequence
  Synthetic
aaggagacagagcuggu

SEQ ID NO: 801 - RNA, 17 nt, Artificial Sequence
  Synthetic
aggagacagagcugguu

SEQ ID NO: 802 - RNA, 17 nt, Artificial Sequence
  Synthetic
agcugguugggaagaca

SEQ ID NO: 803 - RNA, 17 nt, Artificial Sequence
  Synthetic
gcugguugggaagacau

SEQ ID NO: 804 - RNA, 17 nt, Artificial Sequence
  Synthetic
cugguugggaagacaug

SEQ ID NO: 805 - RNA, 17 nt, Artificial Sequence
  Synthetic
guugggaagacaugggg

SEQ ID NO: 806 - RNA, 17 nt, Artificial Sequence
  Synthetic
ggaagacauggggagga

SEQ ID NO: 807 - RNA, 17 nt, Artificial Sequence
  Synthetic
cauggggaggaaggaca

SEQ ID NO: 808 - RNA, 17 nt, Artificial Sequence
  Synthetic
aucaugaagaaccuuga

SEQ ID NO: 809 - RNA, 17 nt, Artificial Sequence
  Synthetic
uaagucaugagcugagc

SEQ ID NO: 810 - RNA, 17 nt, Artificial Sequence
  Synthetic
aagucaugagcugagca

SEQ ID NO: 811 - RNA, 17 nt, Artificial Sequence
  Synthetic
gcugagcagggagaucc

SEQ ID NO: 812 - RNA, 17 nt, Artificial Sequence
  Synthetic
agcagggagauccuggu

SEQ ID NO: 813 - RNA, 17 nt, Artificial Sequence
  Synthetic
cugguugguguugcaga

SEQ ID NO: 814 - RNA, 17 nt, Artificial Sequence
  Synthetic
gcagaagguuuacucug

SEQ ID NO: 815 - RNA, 17 nt, Artificial Sequence
  Synthetic
guuuacucuguggccaa

SEQ ID NO: 816 - RNA, 17 nt, Artificial Sequence
  Synthetic
uacucuguggccaaagg

SEQ ID NO: 817 - RNA, 17 nt, Artificial Sequence
  Synthetic
acucuguggccaaagga

SEQ ID NO: 818 - RNA, 17 nt, Artificial Sequence
  Synthetic
guggccaaaggaggguc

SEQ ID NO: 819 - RNA, 17 nt, Artificial Sequence
  Synthetic
ccaaaggagggucagga

SEQ ID NO: 820 - RNA, 17 nt, Artificial Sequence
  Synthetic
aggaaggaugagcauuu

SEQ ID NO: 821 - RNA, 17 nt, Artificial Sequence
  Synthetic
ggaaggaugagcauuua

SEQ ID NO: 822 - RNA, 17 nt, Artificial Sequence
  Synthetic
gaugagcauuuagggca

SEQ ID NO: 823 - RNA, 17 nt, Artificial Sequence
  Synthetic
gaccaccaacagcccuc

SEQ ID NO: 824 - RNA, 17 nt, Artificial Sequence
  Synthetic
ccaacagcccucagguc

SEQ ID NO: 825 - RNA, 17 nt, Artificial Sequence
  Synthetic
caacagcccucagguca

SEQ ID NO: 826 - RNA, 17 nt, Artificial Sequence
  Synthetic
gcccucaggucagggug

SEQ ID NO: 827 - RNA, 17 nt, Artificial Sequence
  Synthetic
ucaggucagggugagga

SEQ ID NO: 828 - RNA, 17 nt, Artificial Sequence
  Synthetic
ggccucugcuaagcuca

SEQ ID NO: 829 - RNA, 17 nt, Artificial Sequence
  Synthetic
gcuaagcucaaggcgug

SEQ ID NO: 830 - RNA, 17 nt, Artificial Sequence
  Synthetic
agcucaaggcgugagga

SEQ ID NO: 831 - RNA, 17 nt, Artificial Sequence
  Synthetic
gcucaaggcgugaggau

SEQ ID NO: 832 - RNA, 17 nt, Artificial Sequence
  Synthetic
aaggcgugaggauggga

SEQ ID NO: 833 - RNA, 17 nt, Artificial Sequence
  Synthetic
gcgugaggaugggaagg

SEQ ID NO: 834 - RNA, 17 nt, Artificial Sequence
  Synthetic
cgugaggaugggaagga

SEQ ID NO: 835 - RNA, 17 nt, Artificial Sequence
  Synthetic
gaggaugggaaggaggg

SEQ ID NO: 836 - RNA, 17 nt, Artificial Sequence
  Synthetic
ggagggagguauucgua

SEQ ID NO: 837 - RNA, 17 nt, Artificial Sequence
  Synthetic
ggagguauucguaagga

SEQ ID NO: 838 - RNA, 17 nt, Artificial Sequence
  Synthetic
gagguauucguaaggau

SEQ ID NO: 839 - RNA, 17 nt, Artificial Sequence
  Synthetic
uauucguaaggauggga

SEQ ID NO: 840 - RNA, 17 nt, Artificial Sequence
  Synthetic
ucguaaggaugggaagg

SEQ ID NO: 841 - RNA, 17 nt, Artificial Sequence
  Synthetic
cguaaggaugggaagga

SEQ ID NO: 842 - RNA, 17 nt, Artificial Sequence
  Synthetic
aaggaugggaaggaggg

SEQ ID NO: 843 - RNA, 17 nt, Artificial Sequence
  Synthetic
uauucgugcagcauaug

SEQ ID NO: 844 - RNA, 17 nt, Artificial Sequence
  Synthetic
ugcagagucagcagaac

SEQ ID NO: 845 - RNA, 17 nt, Artificial Sequence
  Synthetic
gcagagucagcagaacu

SEQ ID NO: 846 - RNA, 17 nt, Artificial Sequence
  Synthetic
cagagucagcagaacug

SEQ ID NO: 847 - RNA, 17 nt, Artificial Sequence
  Synthetic
agucagcagaacugggg

SEQ ID NO: 848 - RNA, 17 nt, Artificial Sequence
  Synthetic
cagaacugggguggauu

SEQ ID NO: 849 - RNA, 17 nt, Artificial Sequence
  Synthetic
agaacugggguggauuu

SEQ ID NO: 850 - RNA, 17 nt, Artificial Sequence
  Synthetic
cugggguggauuugggu

SEQ ID NO: 851 - RNA, 17 nt, Artificial Sequence
  Synthetic
gauuuggguuggaagug

SEQ ID NO: 852 - RNA, 17 nt, Artificial Sequence
  Synthetic
auuuggguuggaaguga

SEQ ID NO: 853 - RNA, 17 nt, Artificial Sequence
  Synthetic
ggaagugagggucagag

SEQ ID NO: 854 - RNA, 17 nt, Artificial Sequence
  Synthetic
cuagucuucaagcagau

SEQ ID NO: 855 - RNA, 17 nt, Artificial Sequence
  Synthetic
aagacaucaagcacaga

SEQ ID NO: 856 - RNA, 17 nt, Artificial Sequence
  Synthetic
acaucaagcacagaagg

SEQ ID NO: 857 - RNA, 17 nt, Artificial Sequence
  Synthetic
ucaagcacagaaggagg

SEQ ID NO: 858 - RNA, 17 nt, Artificial Sequence
  Synthetic
agcacagaaggaggagg

SEQ ID NO: 859 - RNA, 17 nt, Artificial Sequence
  Synthetic
acagaaggaggaggagg

SEQ ID NO: 860 - RNA, 17 nt, Artificial Sequence
  Synthetic
ggaggaggaggagguuu

SEQ ID NO: 861 - RNA, 17 nt, Artificial Sequence
  Synthetic
uuaggucaagaagaaga

SEQ ID NO: 862 - RNA, 17 nt, Artificial Sequence
  Synthetic
ucaagaagaagauggau

SEQ ID NO: 863 - RNA, 17 nt, Artificial Sequence
  Synthetic
agauggauugguguaaa

SEQ ID NO: 864 - RNA, 17 nt, Artificial Sequence
  Synthetic
ggauugguguaaaagga

SEQ ID NO: 865 - RNA, 17 nt, Artificial Sequence
  Synthetic
gauugguguaaaaggau

SEQ ID NO: 866 - RNA, 17 nt, Artificial Sequence
  Synthetic
guguaaaaggauggguc

SEQ ID NO: 867 - RNA, 17 nt, Artificial Sequence
  Synthetic
agucucacccagacucc

SEQ ID NO: 868 - RNA, 17 nt, Artificial Sequence
  Synthetic
ucccagcugaaauacug

SEQ ID NO: 869 - RNA, 17 nt, Artificial Sequence
  Synthetic
cccagcugaaauacuga

SEQ ID NO: 870 - RNA, 17 nt, Artificial Sequence
  Synthetic
ccagcugaaauacugag

SEQ ID NO: 871 - RNA, 17 nt, Artificial Sequence
  Synthetic
aauacugaggggucucc

SEQ ID NO: 872 - RNA, 17 nt, Artificial Sequence
  Synthetic
acugaggggucuccagg

SEQ ID NO: 873 - RNA, 17 nt, Artificial Sequence
  Synthetic
agauuuaugaauacacg

SEQ ID NO: 874 - RNA, 17 nt, Artificial Sequence
  Synthetic
ugaauacacgagguaug

SEQ ID NO: 875 - RNA, 17 nt, Artificial Sequence
  Synthetic
cacgagguaugaggucu

SEQ ID NO: 876 - RNA, 17 nt, Artificial Sequence
  Synthetic
gcucacacaugagaucu

SEQ ID NO: 877 - RNA, 17 nt, Artificial Sequence
  Synthetic
cacaugagaucuaggug

SEQ ID NO: 878 - RNA, 17 nt, Artificial Sequence
  Synthetic
accuaguagucauuuca

SEQ ID NO: 879 - RNA, 17 nt, Artificial Sequence
  Synthetic
ccuaguagucauuucau

SEQ ID NO: 880 - RNA, 17 nt, Artificial Sequence
  Synthetic
gucauuucauggguugu

SEQ ID NO: 881 - RNA, 17 nt, Artificial Sequence
  Synthetic
ucauuucauggguuguu

SEQ ID NO: 882 - RNA, 17 nt, Artificial Sequence
  Synthetic
uuucauggguuguuggg

SEQ ID NO: 883 - RNA, 17 nt, Artificial Sequence
  Synthetic
guugggaggauucuaug

SEQ ID NO: 884 - RNA, 17 nt, Artificial Sequence
  Synthetic
uucuaugaggcaaccac

SEQ ID NO: 885 - RNA, 17 nt, Artificial Sequence
  Synthetic
cucuuaguuacucauuc

SEQ ID NO: 886 - RNA, 17 nt, Artificial Sequence
  Synthetic
ucuuaguuacucauuca

SEQ ID NO: 887 - RNA, 17 nt, Artificial Sequence
  Synthetic
agcaaagcauugagcaa

SEQ ID NO: 888 - RNA, 17 nt, Artificial Sequence
  Synthetic
gcaaagcauugagcaaa

SEQ ID NO: 889 - RNA, 17 nt, Artificial Sequence
  Synthetic
caaagcauugagcaaag

SEQ ID NO: 890 - RNA, 17 nt, Artificial Sequence
  Synthetic
gcaaaggggucccauag

SEQ ID NO: 891 - RNA, 17 nt, Artificial Sequence
  Synthetic
ggggucccauagaggug

SEQ ID NO: 892 - RNA, 17 nt, Artificial Sequence
  Synthetic
gggucccauagagguga

SEQ ID NO: 893 - RNA, 17 nt, Artificial Sequence
  Synthetic
ccagugcacacaagugu

SEQ ID NO: 894 - RNA, 17 nt, Artificial Sequence
  Synthetic
ugcauuuaaccgucaau

SEQ ID NO: 895 - RNA, 17 nt, Artificial Sequence
  Synthetic
uaaccgucaauaggcaa

SEQ ID NO: 896 - RNA, 17 nt, Artificial Sequence
  Synthetic
aaccgucaauaggcaaa

SEQ ID NO: 897 - RNA, 17 nt, Artificial Sequence
  Synthetic
accgucaauaggcaaag

SEQ ID NO: 898 - RNA, 17 nt, Artificial Sequence
  Synthetic
ccgucaauaggcaaagg

SEQ ID NO: 899 - RNA, 17 nt, Artificial Sequence
  Synthetic
cgucaauaggcaaaggg

SEQ ID NO: 900 - RNA, 17 nt, Artificial Sequence
  Synthetic
aauaggcaaagggggga

SEQ ID NO: 901 - RNA, 17 nt, Artificial Sequence
  Synthetic
auaggcaaaggggggaa

SEQ ID NO: 902 - RNA, 17 nt, Artificial Sequence
  Synthetic
gaagggacauauucauu

SEQ ID NO: 903 - RNA, 17 nt, Artificial Sequence
  Synthetic
ccguauuucagacugaa

SEQ ID NO: 904 - RNA, 17 nt, Artificial Sequence
  Synthetic
cguauuucagacugaau

SEQ ID NO: 905 - RNA, 17 nt, Artificial Sequence
  Synthetic
guauuucagacugaaug

SEQ ID NO: 906 - RNA, 17 nt, Artificial Sequence
  Synthetic
uauuucagacugaaugg

SEQ ID NO: 907 - RNA, 17 nt, Artificial Sequence
  Synthetic
uucagacugaauggggg

SEQ ID NO: 908 - RNA, 17 nt, Artificial Sequence
  Synthetic
ucagacugaaugggggu

SEQ ID NO: 909 - RNA, 17 nt, Artificial Sequence
  Synthetic
cagacugaaugggggug

SEQ ID NO: 910 - RNA, 17 nt, Artificial Sequence
  Synthetic
agacugaaugggggugg

SEQ ID NO: 911 - RNA, 17 nt, Artificial Sequence
  Synthetic
gacugaauggggguggg

SEQ ID NO: 912 - RNA, 17 nt, Artificial Sequence
  Synthetic
acugaaugggggugggg

SEQ ID NO: 913 - RNA, 17 nt, Artificial Sequence
  Synthetic
cugaauggggguggggg

SEQ ID NO: 914 - RNA, 17 nt, Artificial Sequence
  Synthetic
gguggggggggcgccuu

SEQ ID NO: 915 - RNA, 17 nt, Artificial Sequence
  Synthetic
auauaccccuuaguguu

SEQ ID NO: 916 - RNA, 17 nt, Artificial Sequence
  Synthetic
uauaccccuuaguguuu

SEQ ID NO: 917 - RNA, 17 nt, Artificial Sequence
  Synthetic
ggguauauucauuucaa

SEQ ID NO: 918 - RNA, 17 nt, Artificial Sequence
  Synthetic
gguauauucauuucaaa

SEQ ID NO: 919 - RNA, 17 nt, Artificial Sequence
  Synthetic
uucaaagggagagagag

SEQ ID NO: 920 - RNA, 17 nt, Artificial Sequence
  Synthetic
ugagacuguuuugaauu

SEQ ID NO: 921 - RNA, 17 nt, Artificial Sequence
  Synthetic
gagacuguuuugaauuu

SEQ ID NO: 922 - RNA, 17 nt, Artificial Sequence
  Synthetic
agacuguuuugaauuug

SEQ ID NO: 923 - RNA, 17 nt, Artificial Sequence
  Synthetic
gacuguuuugaauuugg

SEQ ID NO: 924 - RNA, 17 nt, Artificial Sequence
  Synthetic
guuuugaauuuggggga

SEQ ID NO: 925 - RNA, 17 nt, Artificial Sequence
  Synthetic
uaaaaccaucauaguac

SEQ ID NO: 926 - RNA, 17 nt, Artificial Sequence
  Synthetic
ccaucauaguacaggua

SEQ ID NO: 927 - RNA, 17 nt, Artificial Sequence
  Synthetic
auaguacagguaaggug

SEQ ID NO: 928 - RNA, 17 nt, Artificial Sequence
  Synthetic
uaguacagguaagguga

SEQ ID NO: 929 - RNA, 17 nt, Artificial Sequence
  Synthetic
ggugagggaauaguaag

SEQ ID NO: 930 - RNA, 17 nt, Artificial Sequence
  Synthetic
aguggugagaacuacuc

SEQ ID NO: 931 - RNA, 17 nt, Artificial Sequence
  Synthetic
guggugagaacuacuca

SEQ ID NO: 932 - RNA, 17 nt, Artificial Sequence
  Synthetic
aacuacucagggaauga

SEQ ID NO: 933 - RNA, 17 nt, Artificial Sequence
  Synthetic
ggugucagaauaauaag

SEQ ID NO: 934 - RNA, 17 nt, Artificial Sequence
  Synthetic
cagccucugaauaugaa

SEQ ID NO: 935 - RNA, 17 nt, Artificial Sequence
  Synthetic
augaacggugagcauug

SEQ ID NO: 936 - RNA, 17 nt, Artificial Sequence
  Synthetic
gcauuguggcugucagc

SEQ ID NO: 937 - RNA, 17 nt, Artificial Sequence
  Synthetic
ucagcaggaagcaacga

SEQ ID NO: 938 - RNA, 17 nt, Artificial Sequence
  Synthetic
cagcaggaagcaacgaa

SEQ ID NO: 939 - RNA, 17 nt, Artificial Sequence
  Synthetic
cuuuugcucuuaaguug

SEQ ID NO: 940 - RNA, 17 nt, Artificial Sequence
  Synthetic
gagugcaacaguagcau

SEQ ID NO: 941 - RNA, 17 nt, Artificial Sequence
  Synthetic
cauaggacccuacccuc

SEQ ID NO: 942 - RNA, 17 nt, Artificial Sequence
  Synthetic
auaggacccuacccucu

SEQ ID NO: 943 - RNA, 20 nt, Artificial Sequence
  Synthetic
augucagaaugucuuugacu

SEQ ID NO: 944 - RNA, 20 nt, Artificial Sequence
  Synthetic
augucuuugacuuggcccag

SEQ ID NO: 945 - RNA, 20 nt, Artificial Sequence
  Synthetic
ugucuuugacuuggcccaga

SEQ ID NO: 946 - RNA, 20 nt, Artificial Sequence
  Synthetic
uuugacuuggcccagagggu

SEQ ID NO: 947 - RNA, 20 nt, Artificial Sequence
  Synthetic
uugacuuggcccagagggua

SEQ ID NO: 948 - RNA, 20 nt, Artificial Sequence
  Synthetic
cuccacaacuuaagagcaaa

SEQ ID NO: 949 - RNA, 20 nt, Artificial Sequence
  Synthetic
ugcucaccguucauauucag

SEQ ID NO: 950 - RNA, 20 nt, Artificial Sequence
  Synthetic
ucaccuuaccuguacuauga

SEQ ID NO: 951 - RNA, 20 nt, Artificial Sequence
  Synthetic
augaauauacccaaacacua

SEQ ID NO: 952 - RNA, 20 nt, Artificial Sequence
  Synthetic
ugaauauacccaaacacuaa

SEQ ID NO: 953 - RNA, 20 nt, Artificial Sequence
  Synthetic
gaauauacccaaacacuaag

SEQ ID NO: 954 - RNA, 20 nt, Artificial Sequence
  Synthetic
aagggguauauucauuucaa

SEQ ID NO: 955 - RNA, 20 nt, Artificial Sequence
  Synthetic
agggguauauucauuucaaa

SEQ ID NO: 956 - RNA, 20 nt, Artificial Sequence
  Synthetic
gguauauucauuucaaaggg

SEQ ID NO: 957 - RNA, 20 nt, Artificial Sequence
  Synthetic
guauauucauuucaaaggga

SEQ ID NO: 958 - RNA, 20 nt, Artificial Sequence
  Synthetic
acgauuuuuucuguugcuuc

SEQ ID NO: 959 - RNA, 20 nt, Artificial Sequence
  Synthetic
ucuguugcuucugguuuguc

SEQ ID NO: 960 - RNA, 20 nt, Artificial Sequence
  Synthetic
gcuucugguuugucuggaga

SEQ ID NO: 961 - RNA, 20 nt, Artificial Sequence
  Synthetic
guuugucuggagaaggcauc

SEQ ID NO: 962 - RNA, 20 nt, Artificial Sequence
  Synthetic
gcaucuggaauaaguaccua

SEQ ID NO: 963 - RNA, 20 nt, Artificial Sequence
  Synthetic
cccccauucagucugaaaua

SEQ ID NO: 964 - RNA, 20 nt, Artificial Sequence
  Synthetic
ccauucagucugaaauacgg

SEQ ID NO: 965 - RNA, 20 nt, Artificial Sequence
  Synthetic
ucagucugaaauacggaggc

SEQ ID NO: 966 - RNA, 20 nt, Artificial Sequence
  Synthetic
gcugguaaauuguacuuuug

SEQ ID NO: 967 - RNA, 20 nt, Artificial Sequence
  Synthetic
cugguaaauuguacuuuugu

SEQ ID NO: 968 - RNA, 20 nt, Artificial Sequence
  Synthetic
uuguacuuuuguggguuuua

SEQ ID NO: 969 - RNA, 20 nt, Artificial Sequence
  Synthetic
uuuguggguuuuaaggcuca

SEQ ID NO: 970 - RNA, 20 nt, Artificial Sequence
  Synthetic
uuccccccuuugccuauuga

SEQ ID NO: 971 - RNA, 20 nt, Artificial Sequence
  Synthetic
auaccuacacuugugugcac

SEQ ID NO: 972 - RNA, 20 nt, Artificial Sequence
  Synthetic
uaccuacacuugugugcacu

SEQ ID NO: 973 - RNA, 20 nt, Artificial Sequence
  Synthetic
uacacuugugugcacugggc

SEQ ID NO: 974 - RNA, 20 nt, Artificial Sequence
  Synthetic
aggcagcaucuuaguuuuuc

SEQ ID NO: 975 - RNA, 20 nt, Artificial Sequence
  Synthetic
ucaggcuucccucaccucua

SEQ ID NO: 976 - RNA, 20 nt, Artificial Sequence
  Synthetic
caggcuucccucaccucuau

SEQ ID NO: 977 - RNA, 20 nt, Artificial Sequence
  Synthetic
uaugugcuaaaugcugccug

SEQ ID NO: 978 - RNA, 20 nt, Artificial Sequence
  Synthetic
caacccaugaaaugacuacu

SEQ ID NO: 979 - RNA, 20 nt, Artificial Sequence
  Synthetic
ucauaaaucuagucuccucc

SEQ ID NO: 980 - RNA, 20 nt, Artificial Sequence
  Synthetic
agaccccucaguauuucagc

SEQ ID NO: 981 - RNA, 20 nt, Artificial Sequence
  Synthetic
gaccccucaguauuucagcu

SEQ ID NO: 982 - RNA, 20 nt, Artificial Sequence
  Synthetic
ccucaguauuucagcuggga

SEQ ID NO: 983 - RNA, 20 nt, Artificial Sequence
  Synthetic
cucaguauuucagcugggau

SEQ ID NO: 984 - RNA, 20 nt, Artificial Sequence
  Synthetic
guauuucagcugggauggga

SEQ ID NO: 985 - RNA, 20 nt, Artificial Sequence
  Synthetic
gcauucagugaaagacagcc

SEQ ID NO: 986 - RNA, 20 nt, Artificial Sequence
  Synthetic
gugaaagacagccuggaguc

SEQ ID NO: 987 - RNA, 20 nt, Artificial Sequence
  Synthetic
ugaaagacagccuggagucu

SEQ ID NO: 988 - RNA, 20 nt, Artificial Sequence
  Synthetic
cugugcuugaugucuuuuca

SEQ ID NO: 989 - RNA, 20 nt, Artificial Sequence
  Synthetic
ugugcuugaugucuuuucaa

SEQ ID NO: 990 - RNA, 20 nt, Artificial Sequence
  Synthetic
cuccaaucugcuugaagacu

SEQ ID NO: 991 - RNA, 20 nt, Artificial Sequence
  Synthetic
uccaaucugcuugaagacua

SEQ ID NO: 992 - RNA, 20 nt, Artificial Sequence
  Synthetic
ucacgccuugagcuuagcag

SEQ ID NO: 993 - RNA, 20 nt, Artificial Sequence
  Synthetic
gccauccucacccugaccug

SEQ ID NO: 994 - RNA, 20 nt, Artificial Sequence
  Synthetic
ccauccucacccugaccuga

SEQ ID NO: 995 - RNA, 20 nt, Artificial Sequence
  Synthetic
cacccugaccugagggcugu

SEQ ID NO: 996 - RNA, 20 nt, Artificial Sequence
  Synthetic
ccugaccugagggcuguugg

SEQ ID NO: 997 - RNA, 20 nt, Artificial Sequence
  Synthetic
cauccuuccugacccuccuu

SEQ ID NO: 998 - RNA, 20 nt, Artificial Sequence
  Synthetic
aaccuucugcaacaccaacc

SEQ ID NO: 999 - RNA, 20 nt, Artificial Sequence
  Synthetic
ugcucagcucaugacuuaga

SEQ ID NO: 1000 - RNA, 20 nt, Artificial Sequence
  Synthetic
uagacggagcaaugccguca

SEQ ID NO: 1001 - RNA, 20 nt, Artificial Sequence
  Synthetic
cccaugcagugcuugcagug

SEQ ID NO: 1002 - RNA, 20 nt, Artificial Sequence
  Synthetic
gaagcuuccccagcucuccc

SEQ ID NO: 1003 - RNA, 20 nt, Artificial Sequence
  Synthetic
caggccacaagucucucgcc

SEQ ID NO: 1004 - RNA, 20 nt, Artificial Sequence
  Synthetic
gaaacuuauuaaccauaccu

SEQ ID NO: 1005 - RNA, 20 nt, Artificial Sequence
  Synthetic
acuuauuaaccauaccuugg

SEQ ID NO: 1006 - RNA, 20 nt, Artificial Sequence
  Synthetic
cuuauuaaccauaccuugga

SEQ ID NO: 1007 - RNA, 20 nt, Artificial Sequence
  Synthetic
uuauuaaccauaccuuggag

SEQ ID NO: 1008 - RNA, 20 nt, Artificial Sequence
  Synthetic
ccuauauguugccuuguacu

SEQ ID NO: 1009 - RNA, 20 nt, Artificial Sequence
  Synthetic
guacauuucugaaauaauuu

SEQ ID NO: 1010 - RNA, 20 nt, Artificial Sequence
  Synthetic
caagaaucagcaauucucug

SEQ ID NO: 1011 - RNA, 20 nt, Artificial Sequence
  Synthetic
cuuucuuuuaaauauacaua

SEQ ID NO: 1012 - RNA, 20 nt, Artificial Sequence
  Synthetic
aaauauacauaaggaacuuu

SEQ ID NO: 1013 - RNA, 20 nt, Artificial Sequence
  Synthetic
auaaggaacuuucggaguga

SEQ ID NO: 1014 - RNA, 20 nt, Artificial Sequence
  Synthetic
uaaggaacuuucggagugaa

SEQ ID NO: 1015 - RNA, 20 nt, Artificial Sequence
  Synthetic
caauaacuugaugcauguga

SEQ ID NO: 1016 - RNA, 20 nt, Artificial Sequence
  Synthetic
aauaacuugaugcaugugaa

SEQ ID NO: 1017 - RNA, 20 nt, Artificial Sequence
  Synthetic
auaacuugaugcaugugaag

SEQ ID NO: 1018 - RNA, 20 nt, Artificial Sequence
  Synthetic
caugugaaggggagauaaaa

SEQ ID NO: 1019 - RNA, 20 nt, Artificial Sequence
  Synthetic
uucaucaacauauuuugauu

SEQ ID NO: 1020 - RNA, 20 nt, Artificial Sequence
  Synthetic
auuuggcuuucuauaauuga

SEQ ID NO: 1021 - RNA, 20 nt, Artificial Sequence
  Synthetic
uuuggcuuucuauaauugau

SEQ ID NO: 1022 - RNA, 20 nt, Artificial Sequence
  Synthetic
uuaaacagaugccaaauaaa

SEQ ID NO: 1023 - RNA, 20 nt, Artificial Sequence
  Synthetic
ucccaccccacccccagccc

SEQ ID NO: 1024 - RNA, 20 nt, Artificial Sequence
  Synthetic
gccaugugcacaacucugac

SEQ ID NO: 1025 - RNA, 20 nt, Artificial Sequence
  Synthetic
ccaugugcacaacucugacu

SEQ ID NO: 1026 - RNA, 20 nt, Artificial Sequence
  Synthetic
agauauuuccugcuccccag

SEQ ID NO: 1027 - RNA, 20 nt, Artificial Sequence
  Synthetic
uuuccugcuccccaguggau

SEQ ID NO: 1028 - RNA, 20 nt, Artificial Sequence
  Synthetic
uuccugcuccccaguggauc

SEQ ID NO: 1029 - RNA, 20 nt, Artificial Sequence
  Synthetic
guaaacugagcuugcucgcu

SEQ ID NO: 1030 - RNA, 20 nt, Artificial Sequence
  Synthetic
uaaacugagcuugcucgcuc

SEQ ID NO: 1031 - RNA, 20 nt, Artificial Sequence
  Synthetic
cucgcucgggagccucuugc

SEQ ID NO: 1032 - RNA, 20 nt, Artificial Sequence
  Synthetic
acagcauuugcagaagcguu

SEQ ID NO: 1033 - RNA, 20 nt, Artificial Sequence
  Synthetic
agcguuuggcaaugugcuuu

SEQ ID NO: 1034 - RNA, 20 nt, Artificial Sequence
  Synthetic
gcuuuuggaagaagacuaag

SEQ ID NO: 1035 - RNA, 20 nt, Artificial Sequence
  Synthetic
ucugaacuucuccccgacaa

SEQ ID NO: 1036 - RNA, 20 nt, Artificial Sequence
  Synthetic
cccgacaaaggcauagauga

SEQ ID NO: 1037 - RNA, 20 nt, Artificial Sequence
  Synthetic
ccgacaaaggcauagaugau

SEQ ID NO: 1038 - RNA, 20 nt, Artificial Sequence
  Synthetic
cgacaaaggcauagaugaug

SEQ ID NO: 1039 - RNA, 20 nt, Artificial Sequence
  Synthetic
ucucugucaccugcauagcu

SEQ ID NO: 1040 - RNA, 20 nt, Artificial Sequence
  Synthetic
uagagcuacugcaauuauuc

SEQ ID NO: 1041 - RNA, 20 nt, Artificial Sequence
  Synthetic
uauucaggccaaagaauucc

SEQ ID NO: 1042 - RNA, 20 nt, Artificial Sequence
  Synthetic
caggccaaagaauuccugga

SEQ ID NO: 1043 - RNA, 20 nt, Artificial Sequence
  Synthetic
agaauuccuggaagguguuc

SEQ ID NO: 1044 - RNA, 20 nt, Artificial Sequence
  Synthetic
ccuggaagguguucaggaga

SEQ ID NO: 1045 - RNA, 20 nt, Artificial Sequence
  Synthetic
caggagaaggacaauguugu

SEQ ID NO: 1046 - RNA, 20 nt, Artificial Sequence
  Synthetic
aggagaaggacaauguugua

SEQ ID NO: 1047 - RNA, 20 nt, Artificial Sequence
  Synthetic
gagaaaauaaacaaucauga

SEQ ID NO: 1048 - RNA, 20 nt, Artificial Sequence
  Synthetic
gacaccgaagcagaguuuuu

SEQ ID NO: 1049 - RNA, 20 nt, Artificial Sequence
  Synthetic
cagaugaccaugacaagcag

SEQ ID NO: 1050 - RNA, 20 nt, Artificial Sequence
  Synthetic
ugaccaugacaagcagcggc

SEQ ID NO: 1051 - RNA, 20 nt, Artificial Sequence
  Synthetic
agaugacuaucuuuaauguc

SEQ ID NO: 1052 - RNA, 20 nt, Artificial Sequence
  Synthetic
cagaauugauacugacugua

SEQ ID NO: 1053 - RNA, 20 nt, Artificial Sequence
  Synthetic
guauggaaaaugagagcugc

SEQ ID NO: 1054 - RNA, 17 nt, Artificial Sequence
  Synthetic
ucagaaugucuuugacu

SEQ ID NO: 1055 - RNA, 17 nt, Artificial Sequence
  Synthetic
ucuuugacuuggcccag

SEQ ID NO: 1056 - RNA, 17 nt, Artificial Sequence
  Synthetic
cuuugacuuggcccaga

SEQ ID NO: 1057 - RNA, 17 nt, Artificial Sequence
  Synthetic
gacuuggcccagagggu

SEQ ID NO: 1058 - RNA, 17 nt, Artificial Sequence
  Synthetic
acuuggcccagagggua

SEQ ID NO: 1059 - RNA, 17 nt, Artificial Sequence
  Synthetic
cacaacuuaagagcaaa

SEQ ID NO: 1060 - RNA, 17 nt, Artificial Sequence
  Synthetic
ucaccguucauauucag

SEQ ID NO: 1061 - RNA, 17 nt, Artificial Sequence
  Synthetic
ccuuaccuguacuauga

SEQ ID NO: 1062 - RNA, 17 nt, Artificial Sequence
  Synthetic
aauauacccaaacacua

SEQ ID NO: 1063 - RNA, 17 nt, Artificial Sequence
  Synthetic
auauacccaaacacuaa

SEQ ID NO: 1064 - RNA, 17 nt, Artificial Sequence
  Synthetic
uauacccaaacacuaag

SEQ ID NO: 1065 - RNA, 17 nt, Artificial Sequence
  Synthetic
ggguauauucauuucaa

SEQ ID NO: 1066 - RNA, 17 nt, Artificial Sequence
  Synthetic
gguauauucauuucaaa

SEQ ID NO: 1067 - RNA, 17 nt, Artificial Sequence
  Synthetic
auauucauuucaaaggg

SEQ ID NO: 1068 - RNA, 17 nt, Artificial Sequence
  Synthetic
uauucauuucaaaggga

SEQ ID NO: 1069 - RNA, 17 nt, Artificial Sequence
  Synthetic
auuuuuucuguugcuuc

SEQ ID NO: 1070 - RNA, 17 nt, Artificial Sequence
  Synthetic
guugcuucugguuuguc

SEQ ID NO: 1071 - RNA, 17 nt, Artificial Sequence
  Synthetic
ucugguuugucuggaga

SEQ ID NO: 1072 - RNA, 17 nt, Artificial Sequence
  Synthetic
ugucuggagaaggcauc

SEQ ID NO: 1073 - RNA, 17 nt, Artificial Sequence
  Synthetic
ucuggaauaaguaccua

SEQ ID NO: 1074 - RNA, 17 nt, Artificial Sequence
  Synthetic
ccauucagucugaaaua

SEQ ID NO: 1075 - RNA, 17 nt, Artificial Sequence
  Synthetic
uucagucugaaauacgg

SEQ ID NO: 1076 - RNA, 17 nt, Artificial Sequence
  Synthetic
gucugaaauacggaggc

SEQ ID NO: 1077 - RNA, 17 nt, Artificial Sequence
  Synthetic
gguaaauuguacuuuug

SEQ ID NO: 1078 - RNA, 17 nt, Artificial Sequence
  Synthetic
guaaauuguacuuuugu

SEQ ID NO: 1079 - RNA, 17 nt, Artificial Sequence
  Synthetic
uacuuuuguggguuuua

SEQ ID NO: 1080 - RNA, 17 nt, Artificial Sequence
  Synthetic
guggguuuuaaggcuca

SEQ ID NO: 1081 - RNA, 17 nt, Artificial Sequence
  Synthetic
cccccuuugccuauuga

SEQ ID NO: 1082 - RNA, 17 nt, Artificial Sequence
  Synthetic
ccuacacuugugugcac

SEQ ID NO: 1083 - RNA, 17 nt, Artificial Sequence
  Synthetic
cuacacuugugugcacu

SEQ ID NO: 1084 - RNA, 17 nt, Artificial Sequence
  Synthetic
acuugugugcacugggc

SEQ ID NO: 1085 - RNA, 17 nt, Artificial Sequence
  Synthetic
cagcaucuuaguuuuuc

SEQ ID NO: 1086 - RNA, 17 nt, Artificial Sequence
  Synthetic
ggcuucccucaccucua

SEQ ID NO: 1087 - RNA, 17 nt, Artificial Sequence
  Synthetic
gcuucccucaccucuau

SEQ ID NO: 1088 - RNA, 17 nt, Artificial Sequence
  Synthetic
gugcuaaaugcugccug

SEQ ID NO: 1089 - RNA, 17 nt, Artificial Sequence
  Synthetic
cccaugaaaugacuacu

SEQ ID NO: 1090 - RNA, 17 nt, Artificial Sequence
  Synthetic
uaaaucuagucuccucc

SEQ ID NO: 1091 - RNA, 17 nt, Artificial Sequence
  Synthetic
ccccucaguauuucagc

SEQ ID NO: 1092 - RNA, 17 nt, Artificial Sequence
  Synthetic
cccucaguauuucagcu

SEQ ID NO: 1093 - RNA, 17 nt, Artificial Sequence
  Synthetic
caguauuucagcuggga

SEQ ID NO: 1094 - RNA, 17 nt, Artificial Sequence
  Synthetic
aguauuucagcugggau

SEQ ID NO: 1095 - RNA, 17 nt, Artificial Sequence
  Synthetic
uuucagcugggauggga

SEQ ID NO: 1096 - RNA, 17 nt, Artificial Sequence
  Synthetic
uucagugaaagacagcc

SEQ ID NO: 1097 - RNA, 17 nt, Artificial Sequence
  Synthetic
aaagacagccuggaguc

SEQ ID NO: 1098 - RNA, 17 nt, Artificial Sequence
  Synthetic
aagacagccuggagucu

SEQ ID NO: 1099 - RNA, 17 nt, Artificial Sequence
  Synthetic
ugcuugaugucuuuuca

SEQ ID NO: 1100 - RNA, 17 nt, Artificial Sequence
  Synthetic
gcuugaugucuuuucaa

SEQ ID NO: 1101 - RNA, 17 nt, Artificial Sequence
  Synthetic
caaucugcuugaagacu

SEQ ID NO: 1102 - RNA, 17 nt, Artificial Sequence
  Synthetic
aaucugcuugaagacua

SEQ ID NO: 1103 - RNA, 17 nt, Artificial Sequence
  Synthetic
cgccuugagcuuagcag

SEQ ID NO: 1104 - RNA, 17 nt, Artificial Sequence
  Synthetic
auccucacccugaccug

SEQ ID NO: 1105 - RNA, 17 nt, Artificial Sequence
  Synthetic
uccucacccugaccuga

SEQ ID NO: 1106 - RNA, 17 nt, Artificial Sequence
  Synthetic
ccugaccugagggcugu

SEQ ID NO: 1107 - RNA, 17 nt, Artificial Sequence
  Synthetic
gaccugagggcuguugg

SEQ ID NO: 1108 - RNA, 17 nt, Artificial Sequence
  Synthetic
ccuuccugacccuccuu

SEQ ID NO: 1109 - RNA, 17 nt, Artificial Sequence
  Synthetic
cuucugcaacaccaacc

SEQ ID NO: 1110 - RNA, 17 nt, Artificial Sequence
  Synthetic
ucagcucaugacuuaga

SEQ ID NO: 1111 - RNA, 17 nt, Artificial Sequence
  Synthetic
acggagcaaugccguca

SEQ ID NO: 1112 - RNA, 17 nt, Artificial Sequence
  Synthetic
augcagugcuugcagug

SEQ ID NO: 1113 - RNA, 17 nt, Artificial Sequence
  Synthetic
gcuuccccagcucuccc

SEQ ID NO: 1114 - RNA, 17 nt, Artificial Sequence
  Synthetic
gccacaagucucucgcc

SEQ ID NO: 1115 - RNA, 17 nt, Artificial Sequence
  Synthetic
acuuauuaaccauaccu

SEQ ID NO: 1116 - RNA, 17 nt, Artificial Sequence
  Synthetic
uauuaaccauaccuugg

SEQ ID NO: 1117 - RNA, 17 nt, Artificial Sequence
  Synthetic
auuaaccauaccuugga

SEQ ID NO: 1118 - RNA, 17 nt, Artificial Sequence
  Synthetic
uuaaccauaccuuggag

SEQ ID NO: 1119 - RNA, 17 nt, Artificial Sequence
  Synthetic
auauguugccuuguacu

SEQ ID NO: 1120 - RNA, 17 nt, Artificial Sequence
  Synthetic
cauuucugaaauaauuu

SEQ ID NO: 1121 - RNA, 17 nt, Artificial Sequence
  Synthetic
gaaucagcaauucucug

SEQ ID NO: 1122 - RNA, 17 nt, Artificial Sequence
  Synthetic
ucuuuuaaauauacaua

SEQ ID NO: 1123 - RNA, 17 nt, Artificial Sequence
  Synthetic
uauacauaaggaacuuu

SEQ ID NO: 1124 - RNA, 17 nt, Artificial Sequence
  Synthetic
aggaacuuucggaguga

SEQ ID NO: 1125 - RNA, 17 nt, Artificial Sequence
  Synthetic
ggaacuuucggagugaa

SEQ ID NO: 1126 - RNA, 17 nt, Artificial Sequence
  Synthetic
uaacuugaugcauguga

SEQ ID NO: 1127 - RNA, 17 nt, Artificial Sequence
  Synthetic
aacuugaugcaugugaa

SEQ ID NO: 1128 - RNA, 17 nt, Artificial Sequence
  Synthetic
acuugaugcaugugaag

SEQ ID NO: 1129 - RNA, 17 nt, Artificial Sequence
  Synthetic
gugaaggggagauaaaa

SEQ ID NO: 1130 - RNA, 17 nt, Artificial Sequence
  Synthetic
aucaacauauuuugauu

SEQ ID NO: 1131 - RNA, 17 nt, Artificial Sequence
  Synthetic
uggcuuucuauaauuga

SEQ ID NO: 1132 - RNA, 17 nt, Artificial Sequence
  Synthetic
ggcuuucuauaauugau

SEQ ID NO: 1133 - RNA, 17 nt, Artificial Sequence
  Synthetic
aacagaugccaaauaaa

SEQ ID NO: 1134 - RNA, 17 nt, Artificial Sequence
  Synthetic
caccccacccccagccc

SEQ ID NO: 1135 - RNA, 17 nt, Artificial Sequence
  Synthetic
augugcacaacucugac

SEQ ID NO: 1136 - RNA, 17 nt, Artificial Sequence
  Synthetic
ugugcacaacucugacu

SEQ ID NO: 1137 - RNA, 17 nt, Artificial Sequence
  Synthetic
uauuuccugcuccccag

SEQ ID NO: 1138 - RNA, 17 nt, Artificial Sequence
  Synthetic
ccugcuccccaguggau

SEQ ID NO: 1139 - RNA, 17 nt, Artificial Sequence
  Synthetic
cugcuccccaguggauc

SEQ ID NO: 1140 - RNA, 17 nt, Artificial Sequence
  Synthetic
aacugagcuugcucgcu

SEQ ID NO: 1141 - RNA, 17 nt, Artificial Sequence
  Synthetic
acugagcuugcucgcuc

SEQ ID NO: 1142 - RNA, 17 nt, Artificial Sequence
  Synthetic
gcucgggagccucuugc

SEQ ID NO: 1143 - RNA, 17 nt, Artificial Sequence
  Synthetic
gcauuugcagaagcguu

SEQ ID NO: 1144 - RNA, 17 nt, Artificial Sequence
  Synthetic
guuuggcaaugugcuuu

SEQ ID NO: 1145 - RNA, 17 nt, Artificial Sequence
  Synthetic
uuuggaagaagacuaag

SEQ ID NO: 1146 - RNA, 17 nt, Artificial Sequence
  Synthetic
gaacuucuccccgacaa

SEQ ID NO: 1147 - RNA, 17 nt, Artificial Sequence
  Synthetic
gacaaaggcauagauga

SEQ ID NO: 1148 - RNA, 17 nt, Artificial Sequence
  Synthetic
acaaaggcauagaugau

SEQ ID NO: 1149 - RNA, 17 nt, Artificial Sequence
  Synthetic
caaaggcauagaugaug

SEQ ID NO: 1150 - RNA, 17 nt, Artificial Sequence
  Synthetic
cugucaccugcauagcu

SEQ ID NO: 1151 - RNA, 17 nt, Artificial Sequence
  Synthetic
agcuacugcaauuauuc

SEQ ID NO: 1152 - RNA, 17 nt, Artificial Sequence
  Synthetic
ucaggccaaagaauucc

SEQ ID NO: 1153 - RNA, 17 nt, Artificial Sequence
  Synthetic
gccaaagaauuccugga

SEQ ID NO: 1154 - RNA, 17 nt, Artificial Sequence
  Synthetic
auuccuggaagguguuc

SEQ ID NO: 1155 - RNA, 17 nt, Artificial Sequence
  Synthetic
ggaagguguucaggaga

SEQ ID NO: 1156 - RNA, 17 nt, Artificial Sequence
  Synthetic
gagaaggacaauguugu

SEQ ID NO: 1157 - RNA, 17 nt, Artificial Sequence
  Synthetic
agaaggacaauguugua

SEQ ID NO: 1158 - RNA, 17 nt, Artificial Sequence
  Synthetic
aaaauaaacaaucauga

SEQ ID NO: 1159 - RNA, 17 nt, Artificial Sequence
  Synthetic
accgaagcagaguuuuu

SEQ ID NO: 1160 - RNA, 17 nt, Artificial Sequence
  Synthetic
augaccaugacaagcag

SEQ ID NO: 1161 - RNA, 17 nt, Artificial Sequence
  Synthetic
ccaugacaagcagcggc

SEQ ID NO: 1162 - RNA, 17 nt, Artificial Sequence
  Synthetic
ugacuaucuuuaauguc

SEQ ID NO: 1163 - RNA, 17 nt, Artificial Sequence
  Synthetic
aauugauacugacugua

SEQ ID NO: 1164 - RNA, 17 nt, Artificial Sequence
  Synthetic
uggaaaaugagagcugc

SEQ ID NO: 1165 - RNA, 20 nt, Artificial Sequence
  Synthetic
augacaucaauuauuauaca

SEQ ID NO: 1166 - RNA, 20 nt, Artificial Sequence
  Synthetic
ugacaucaauuauuauacau

SEQ ID NO: 1167 - RNA, 20 nt, Artificial Sequence
  Synthetic
agcccugccaaaaaaucaau

SEQ ID NO: 1168 - RNA, 20 nt, Artificial Sequence
  Synthetic
ugguguucaucuuugguuuu

SEQ ID NO: 1169 - RNA, 20 nt, Artificial Sequence
  Synthetic
uccugauaaacugcaaaagg

SEQ ID NO: 1170 - RNA, 20 nt, Artificial Sequence
  Synthetic
ugauaaacugcaaaaggcug

SEQ ID NO: 1171 - RNA, 20 nt, Artificial Sequence
  Synthetic
uuccuucuuacuguccccuu

SEQ ID NO: 1172 - RNA, 20 nt, Artificial Sequence
  Synthetic
gcucacuaugcugccgccca

SEQ ID NO: 1173 - RNA, 20 nt, Artificial Sequence
  Synthetic
cucacuaugcugccgcccag

SEQ ID NO: 1174 - RNA, 20 nt, Artificial Sequence
  Synthetic
ugcugccgcccagugggacu

SEQ ID NO: 1175 - RNA, 20 nt, Artificial Sequence
  Synthetic
gcugccgcccagugggacuu

SEQ ID NO: 1176 - RNA, 20 nt, Artificial Sequence
  Synthetic
uacaaugugucaacucuuga

SEQ ID NO: 1177 - RNA, 20 nt, Artificial Sequence
  Synthetic
cuauuuuauaggcuucuucu

SEQ ID NO: 1178 - RNA, 20 nt, Artificial Sequence
  Synthetic
uauuuuauaggcuucuucuc

SEQ ID NO: 1179 - RNA, 20 nt, Artificial Sequence
  Synthetic
gcuguguuugcuuuaaaagc

SEQ ID NO: 1180 - RNA, 20 nt, Artificial Sequence
  Synthetic
aaaagccaggacggucaccu

SEQ ID NO: 1181 - RNA, 20 nt, Artificial Sequence
  Synthetic
aaagccaggacggucaccuu

SEQ ID NO: 1182 - RNA, 20 nt, Artificial Sequence
  Synthetic
guggugacaagugugaucac

SEQ ID NO: 1183 - RNA, 20 nt, Artificial Sequence
  Synthetic
ggcuguguuugcgucucucc

SEQ ID NO: 1184 - RNA, 20 nt, Artificial Sequence
  Synthetic
gcuguguuugcgucucuccc

SEQ ID NO: 1185 - RNA, 17 nt, Artificial Sequence
  Synthetic
acaucaauuauuauaca

SEQ ID NO: 1186 - RNA, 17 nt, Artificial Sequence
  Synthetic
caucaauuauuauacau

SEQ ID NO: 1187 - RNA, 17 nt, Artificial Sequence
  Synthetic
ccugccaaaaaaucaau

SEQ ID NO: 1188 - RNA, 17 nt, Artificial Sequence
  Synthetic
uguucaucuuugguuuu

SEQ ID NO: 1189 - RNA, 17 nt, Artificial Sequence
  Synthetic
ugauaaacugcaaaagg

SEQ ID NO: 1190 - RNA, 17 nt, Artificial Sequence
  Synthetic
uaaacugcaaaaggcug

SEQ ID NO: 1191 - RNA, 17 nt, Artificial Sequence
  Synthetic
cuucuuacuguccccuu

SEQ ID NO: 1192 - RNA, 17 nt, Artificial Sequence
  Synthetic
cacuaugcugccgccca

SEQ ID NO: 1193 - RNA, 17 nt, Artificial Sequence
  Synthetic
acuaugcugccgcccag

SEQ ID NO: 1194 - RNA, 17 nt, Artificial Sequence
  Synthetic
ugccgcccagugggacu

SEQ ID NO: 1195 - RNA, 17 nt, Artificial Sequence
  Synthetic
gccgcccagugggacuu

SEQ ID NO: 1196 - RNA, 17 nt, Artificial Sequence
  Synthetic
aaugugucaacucuuga

SEQ ID NO: 1197 - RNA, 17 nt, Artificial Sequence
  Synthetic
uuuuauaggcuucuucu

SEQ ID NO: 1198 - RNA, 17 nt, Artificial Sequence
  Synthetic
uuuauaggcuucuucuc

SEQ ID NO: 1199 - RNA, 17 nt, Artificial Sequence
  Synthetic
guguuugcuuuaaaagc

SEQ ID NO: 1200 - RNA, 17 nt, Artificial Sequence
  Synthetic
agccaggacggucaccu

SEQ ID NO: 1201 - RNA, 17 nt, Artificial Sequence
  Synthetic
gccaggacggucaccuu

SEQ ID NO: 1202 - RNA, 17 nt, Artificial Sequence
  Synthetic
gugacaagugugaucac

SEQ ID NO: 1203 - RNA, 17 nt, Artificial Sequence
  Synthetic
uguguuugcgucucucc

SEQ ID NO: 1204 - RNA, 17 nt, Artificial Sequence
  Synthetic
guguuugcgucucuccc

SEQ ID NO: 1205 - RNA, 20 nt, Artificial Sequence
  Synthetic
gcuuuuaaagcaaacacagc

SEQ ID NO: 1206 - RNA, 20 nt, Artificial Sequence
  Synthetic
gccagguaccuaucgauugu

SEQ ID NO: 1207 - RNA, 20 nt, Artificial Sequence
  Synthetic
ccagguaccuaucgauuguc

SEQ ID NO: 1208 - RNA, 20 nt, Artificial Sequence
  Synthetic
agguaccuaucgauugucag

SEQ ID NO: 1209 - RNA, 20 nt, Artificial Sequence
  Synthetic
uaucgauugucaggaggaug

SEQ ID NO: 1210 - RNA, 20 nt, Artificial Sequence
  Synthetic
cgauugucaggaggaugaug

SEQ ID NO: 1211 - RNA, 20 nt, Artificial Sequence
  Synthetic
gaggaugaugaagaagauuc

SEQ ID NO: 1212 - RNA, 20 nt, Artificial Sequence
  Synthetic
ggaugaugaagaagauucca

SEQ ID NO: 1213 - RNA, 20 nt, Artificial Sequence
  Synthetic
ugaugaagaagauuccagag

SEQ ID NO: 1214 - RNA, 20 nt, Artificial Sequence
  Synthetic
cagagaagaagccuauaaaa

SEQ ID NO: 1215 - RNA, 20 nt, Artificial Sequence
  Synthetic
cuauaaaauagagcccuguc

SEQ ID NO: 1216 - RNA, 20 nt, Artificial Sequence
  Synthetic
auuguauuuccaaaguccca

SEQ ID NO: 1217 - RNA, 20 nt, Artificial Sequence
  Synthetic
ucccacugggcggcagcaua

SEQ ID NO: 1218 - RNA, 20 nt, Artificial Sequence
  Synthetic
gggcggcagcauagugagcc

SEQ ID NO: 1219 - RNA, 20 nt, Artificial Sequence
  Synthetic
cggcagcauagugagcccag

SEQ ID NO: 1220 - RNA, 20 nt, Artificial Sequence
  Synthetic
ggcagcauagugagcccaga

SEQ ID NO: 1221 - RNA, 20 nt, Artificial Sequence
  Synthetic
gcagcauagugagcccagaa

SEQ ID NO: 1222 - RNA, 20 nt, Artificial Sequence
  Synthetic
ugagcccagaaggggacagu

SEQ ID NO: 1223 - RNA, 20 nt, Artificial Sequence
  Synthetic
gcccagaaggggacaguaag

SEQ ID NO: 1224 - RNA, 20 nt, Artificial Sequence
  Synthetic
cccagaaggggacaguaaga

SEQ ID NO: 1225 - RNA, 20 nt, Artificial Sequence
  Synthetic
aguaagaaggaaaaacaggu

SEQ ID NO: 1226 - RNA, 20 nt, Artificial Sequence
  Synthetic
acaggucagagauggccagg

SEQ ID NO: 1227 - RNA, 20 nt, Artificial Sequence
  Synthetic
uucagccuuuugcaguuuau

SEQ ID NO: 1228 - RNA, 20 nt, Artificial Sequence
  Synthetic
gccuuuugcaguuuaucagg

SEQ ID NO: 1229 - RNA, 20 nt, Artificial Sequence
  Synthetic
cuuuugcaguuuaucaggau

SEQ ID NO: 1230 - RNA, 20 nt, Artificial Sequence
  Synthetic
uguugcccacaaaaccaaag

SEQ ID NO: 1231 - RNA, 20 nt, Artificial Sequence
  Synthetic
aaaaccaaagaugaacacca

SEQ ID NO: 1232 - RNA, 20 nt, Artificial Sequence
  Synthetic
caaagaugaacaccagugag

SEQ ID NO: 1233 - RNA, 20 nt, Artificial Sequence
  Synthetic
gaugaacaccagugaguaga

SEQ ID NO: 1234 - RNA, 20 nt, Artificial Sequence
  Synthetic
augaacaccagugaguagag

SEQ ID NO: 1235 - RNA, 20 nt, Artificial Sequence
  Synthetic
accagugaguagagcggagg

SEQ ID NO: 1236 - RNA, 20 nt, Artificial Sequence
  Synthetic
ccagugaguagagcggaggc

SEQ ID NO: 1237 - RNA, 20 nt, Artificial Sequence
  Synthetic
gaguagagcggaggcaggag

SEQ ID NO: 1238 - RNA, 20 nt, Artificial Sequence
  Synthetic
gcuucacauugauuuuuugg

SEQ ID NO: 1239 - RNA, 20 nt, Artificial Sequence
  Synthetic
auaauaauugaugucauaga

SEQ ID NO: 1240 - RNA, 17 nt, Artificial Sequence
  Synthetic
uuuaaagcaaacacagc

SEQ ID NO: 1241 - RNA, 17 nt, Artificial Sequence
  Synthetic
agguaccuaucgauugu

SEQ ID NO: 1242 - RNA, 17 nt, Artificial Sequence
  Synthetic
gguaccuaucgauuguc

SEQ ID NO: 1243 - RNA, 17 nt, Artificial Sequence
  Synthetic
uaccuaucgauugucag

SEQ ID NO: 1244 - RNA, 17 nt, Artificial Sequence
  Synthetic
cgauugucaggaggaug

SEQ ID NO: 1245 - RNA, 17 nt, Artificial Sequence
  Synthetic
uugucaggaggaugaug

SEQ ID NO: 1246 - RNA, 17 nt, Artificial Sequence
  Synthetic
gaugaugaagaagauuc

SEQ ID NO: 1247 - RNA, 17 nt, Artificial Sequence
  Synthetic
ugaugaagaagauucca

SEQ ID NO: 1248 - RNA, 17 nt, Artificial Sequence
  Synthetic
ugaagaagauuccagag

SEQ ID NO: 1249 - RNA, 17 nt, Artificial Sequence
  Synthetic
agaagaagccuauaaaa

SEQ ID NO: 1250 - RNA, 17 nt, Artificial Sequence
  Synthetic
uaaaauagagcccuguc

SEQ ID NO: 1251 - RNA, 17 nt, Artificial Sequence
  Synthetic
guauuuccaaaguccca

SEQ ID NO: 1252 - RNA, 17 nt, Artificial Sequence
  Synthetic
cacugggcggcagcaua

SEQ ID NO: 1253 - RNA, 17 nt, Artificial Sequence
  Synthetic
cggcagcauagugagcc

SEQ ID NO: 1254 - RNA, 17 nt, Artificial Sequence
  Synthetic
cagcauagugagcccag

SEQ ID NO: 1255 - RNA, 17 nt, Artificial Sequence
  Synthetic
agcauagugagcccaga

SEQ ID NO: 1256 - RNA, 17 nt, Artificial Sequence
  Synthetic
gcauagugagcccagaa

SEQ ID NO: 1257 - RNA, 17 nt, Artificial Sequence
  Synthetic
gcccagaaggggacagu

SEQ ID NO: 1258 - RNA, 17 nt, Artificial Sequence
  Synthetic
cagaaggggacaguaag

SEQ ID NO: 1259 - RNA, 17 nt, Artificial Sequence
  Synthetic
agaaggggacaguaaga

SEQ ID NO: 1260 - RNA, 17 nt, Artificial Sequence
  Synthetic
aagaaggaaaaacaggu

SEQ ID NO: 1261 - RNA, 17 nt, Artificial Sequence
  Synthetic
ggucagagauggccagg

SEQ ID NO: 1262 - RNA, 17 nt, Artificial Sequence
  Synthetic
agccuuuugcaguuuau

SEQ ID NO: 1263 - RNA, 17 nt, Artificial Sequence
  Synthetic
uuuugcaguuuaucagg

SEQ ID NO: 1264 - RNA, 17 nt, Artificial Sequence
  Synthetic
uugcaguuuaucaggau

SEQ ID NO: 1265 - RNA, 17 nt, Artificial Sequence
  Synthetic
ugcccacaaaaccaaag

SEQ ID NO: 1266 - RNA, 17 nt, Artificial Sequence
  Synthetic
accaaagaugaacacca

SEQ ID NO: 1267 - RNA, 17 nt, Artificial Sequence
  Synthetic
agaugaacaccagugag

SEQ ID NO: 1268 - RNA, 17 nt, Artificial Sequence
  Synthetic
gaacaccagugaguaga

SEQ ID NO: 1269 - RNA, 17 nt, Artificial Sequence
  Synthetic
aacaccagugaguagag

SEQ ID NO: 1270 - RNA, 17 nt, Artificial Sequence
  Synthetic
agugaguagagcggagg

SEQ ID NO: 1271 - RNA, 17 nt, Artificial Sequence
  Synthetic
gugaguagagcggaggc

SEQ ID NO: 1272 - RNA, 17 nt, Artificial Sequence
  Synthetic
uagagcggaggcaggag

SEQ ID NO: 1273 - RNA, 17 nt, Artificial Sequence
  Synthetic
ucacauugauuuuuugg

SEQ ID NO: 1274 - RNA, 17 nt, Artificial Sequence
  Synthetic
auaauugaugucauaga

SEQ ID NO: 1275 - RNA, 20 nt, Artificial Sequence
  Synthetic
ccauacagucaguaucaauu

SEQ ID NO: 1276 - RNA, 20 nt, Artificial Sequence
  Synthetic
cauacagucaguaucaauuc

SEQ ID NO: 1277 - RNA, 20 nt, Artificial Sequence
  Synthetic
acagucaguaucaauucugg

SEQ ID NO: 1278 - RNA, 20 nt, Artificial Sequence
  Synthetic
agacauuaaagauagucauc

SEQ ID NO: 1279 - RNA, 20 nt, Artificial Sequence
  Synthetic
gacauuaaagauagucaucu

SEQ ID NO: 1280 - RNA, 20 nt, Artificial Sequence
  Synthetic
uugucauggucaucugcuac

SEQ ID NO: 1281 - RNA, 20 nt, Artificial Sequence
  Synthetic
ugucauggucaucugcuacu

SEQ ID NO: 1282 - RNA, 20 nt, Artificial Sequence
  Synthetic
gucauggucaucugcuacuc

SEQ ID NO: 1283 - RNA, 20 nt, Artificial Sequence
  Synthetic
cuaaaaacucugcuucggug

SEQ ID NO: 1284 - RNA, 20 nt, Artificial Sequence
  Synthetic
aacucugcuucggugucgaa

SEQ ID NO: 1285 - RNA, 20 nt, Artificial Sequence
  Synthetic
cucugcuucggugucgaaau

SEQ ID NO: 1286 - RNA, 20 nt, Artificial Sequence
  Synthetic
ugcuucggugucgaaaugag

SEQ ID NO: 1287 - RNA, 20 nt, Artificial Sequence
  Synthetic
uucggugucgaaaugagaag

SEQ ID NO: 1288 - RNA, 20 nt, Artificial Sequence
  Synthetic
cgaaaugagaagaagaggca

SEQ ID NO: 1289 - RNA, 20 nt, Artificial Sequence
  Synthetic
agaagaagaggcacagggcu

SEQ ID NO: 1290 - RNA, 20 nt, Artificial Sequence
  Synthetic
augauuguuuauuuucucuu

SEQ ID NO: 1291 - RNA, 20 nt, Artificial Sequence
  Synthetic
ccuacaacauuguccuucuc

SEQ ID NO: 1292 - RNA, 20 nt, Artificial Sequence
  Synthetic
uccuucuccugaacaccuuc

SEQ ID NO: 1293 - RNA, 20 nt, Artificial Sequence
  Synthetic
ccuucuccugaacaccuucc

SEQ ID NO: 1294 - RNA, 20 nt, Artificial Sequence
  Synthetic
ccuuccaggaauucuuuggc

SEQ ID NO: 1295 - RNA, 20 nt, Artificial Sequence
  Synthetic
auugcaguagcucuaacagg

SEQ ID NO: 1296 - RNA, 20 nt, Artificial Sequence
  Synthetic
ggaccaagcuaugcagguga

SEQ ID NO: 1297 - RNA, 20 nt, Artificial Sequence
  Synthetic
uaugcaggugacagagacuc

SEQ ID NO: 1298 - RNA, 20 nt, Artificial Sequence
  Synthetic
augcaggugacagagacucu

SEQ ID NO: 1299 - RNA, 20 nt, Artificial Sequence
  Synthetic
ccccaucaucuaugccuuug

SEQ ID NO: 1300 - RNA, 20 nt, Artificial Sequence
  Synthetic
cccaucaucuaugccuuugu

SEQ ID NO: 1301 - RNA, 20 nt, Artificial Sequence
  Synthetic
ccaucaucuaugccuuuguc

SEQ ID NO: 1302 - RNA, 20 nt, Artificial Sequence
  Synthetic
caucaucuaugccuuugucg

SEQ ID NO: 1303 - RNA, 20 nt, Artificial Sequence
  Synthetic
ucaucuaugccuuugucggg

SEQ ID NO: 1304 - RNA, 20 nt, Artificial Sequence
  Synthetic
gccuuugucggggagaaguu

SEQ ID NO: 1305 - RNA, 20 nt, Artificial Sequence
  Synthetic
augcuguucuauuuuccagc

SEQ ID NO: 1306 - RNA, 20 nt, Artificial Sequence
  Synthetic
uauuuuccagcaagaggcuc

SEQ ID NO: 1307 - RNA, 20 nt, Artificial Sequence
  Synthetic
uuccagcaagaggcucccga

SEQ ID NO: 1308 - RNA, 20 nt, Artificial Sequence
  Synthetic
cucaguuuacacccgaucca

SEQ ID NO: 1309 - RNA, 20 nt, Artificial Sequence
  Synthetic
ucaguuuacacccgauccac

SEQ ID NO: 1310 - RNA, 20 nt, Artificial Sequence
  Synthetic
caguuuacacccgauccacu

SEQ ID NO: 1311 - RNA, 20 nt, Artificial Sequence
  Synthetic
aguuuacacccgauccacug

SEQ ID NO: 1312 - RNA, 20 nt, Artificial Sequence
  Synthetic
acacccgauccacuggggag

SEQ ID NO: 1313 - RNA, 20 nt, Artificial Sequence
  Synthetic
cacccgauccacuggggagc

SEQ ID NO: 1314 - RNA, 20 nt, Artificial Sequence
  Synthetic
cuggggagcaggaaauaucu

SEQ ID NO: 1315 - RNA, 20 nt, Artificial Sequence
  Synthetic
aauaucugugggcuugugac

SEQ ID NO: 1316 - RNA, 20 nt, Artificial Sequence
  Synthetic
ggcuugugacacggacucaa

SEQ ID NO: 1317 - RNA, 20 nt, Artificial Sequence
  Synthetic
aagugggcuggugacccagu

SEQ ID NO: 1318 - RNA, 20 nt, Artificial Sequence
  Synthetic
gcuuaguuuucauacacagc

SEQ ID NO: 1319 - RNA, 20 nt, Artificial Sequence
  Synthetic
guuuucauacacagccuggg

SEQ ID NO: 1320 - RNA, 20 nt, Artificial Sequence
  Synthetic
uuuucauacacagccugggc

SEQ ID NO: 1321 - RNA, 20 nt, Artificial Sequence
  Synthetic
uuucauacacagccugggcu

SEQ ID NO: 1322 - RNA, 20 nt, Artificial Sequence
  Synthetic
auacacagccugggcugggg

SEQ ID NO: 1323 - RNA, 20 nt, Artificial Sequence
  Synthetic
uacacagccugggcuggggg

SEQ ID NO: 1324 - RNA, 20 nt, Artificial Sequence
  Synthetic
cagccugggcuggggguggg

SEQ ID NO: 1325 - RNA, 20 nt, Artificial Sequence
  Synthetic
agccugggcugggggugggg

SEQ ID NO: 1326 - RNA, 20 nt, Artificial Sequence
  Synthetic
gccugggcuggggguggggu

SEQ ID NO: 1327 - RNA, 20 nt, Artificial Sequence
  Synthetic
cugggcuggggguggggugg

SEQ ID NO: 1328 - RNA, 20 nt, Artificial Sequence
  Synthetic
gugggagaggucuuuuuuaa

SEQ ID NO: 1329 - RNA, 20 nt, Artificial Sequence
  Synthetic
ugggagaggucuuuuuuaaa

SEQ ID NO: 1330 - RNA, 20 nt, Artificial Sequence
  Synthetic
uuaaaaggaaguuacuguua

SEQ ID NO: 1331 - RNA, 20 nt, Artificial Sequence
  Synthetic
aaaaggaaguuacuguuaua

SEQ ID NO: 1332 - RNA, 20 nt, Artificial Sequence
  Synthetic
ucuuuuaagcccaucaauua

SEQ ID NO: 1333 - RNA, 20 nt, Artificial Sequence
  Synthetic
agccaaaucaaaauauguug

SEQ ID NO: 1334 - RNA, 20 nt, Artificial Sequence
  Synthetic
ugacaaacucucccuucacu

SEQ ID NO: 1335 - RNA, 20 nt, Artificial Sequence
  Synthetic
aguuccuuauguauauuuaa

SEQ ID NO: 1336 - RNA, 20 nt, Artificial Sequence
  Synthetic
guauauuuaaaagaaagccu

SEQ ID NO: 1337 - RNA, 20 nt, Artificial Sequence
  Synthetic
auauuuaaaagaaagccuca

SEQ ID NO: 1338 - RNA, 20 nt, Artificial Sequence
  Synthetic
ccucagagaauugcugauuc

SEQ ID NO: 1339 - RNA, 20 nt, Artificial Sequence
  Synthetic
ugauucuugaguuuagugau

SEQ ID NO: 1340 - RNA, 20 nt, Artificial Sequence
  Synthetic
cuugaguuuagugaucugaa

SEQ ID NO: 1341 - RNA, 20 nt, Artificial Sequence
  Synthetic
cagaaauaccaaaauuauuu

SEQ ID NO: 1342 - RNA, 20 nt, Artificial Sequence
  Synthetic
aaacaggucuuugucuugcu

SEQ ID NO: 1343 - RNA, 20 nt, Artificial Sequence
  Synthetic
aacaggucuuugucuugcua

SEQ ID NO: 1344 - RNA, 20 nt, Artificial Sequence
  Synthetic
acaggucuuugucuugcuau

SEQ ID NO: 1345 - RNA, 20 nt, Artificial Sequence
  Synthetic
caggucuuugucuugcuaug

SEQ ID NO: 1346 - RNA, 20 nt, Artificial Sequence
  Synthetic
ggucuuugucuugcuauggg

SEQ ID NO: 1347 - RNA, 20 nt, Artificial Sequence
  Synthetic
uugcuauggggagaaaagac

SEQ ID NO: 1348 - RNA, 20 nt, Artificial Sequence
  Synthetic
agacaugaauaugauuagua

SEQ ID NO: 1349 - RNA, 20 nt, Artificial Sequence
  Synthetic
guuaauaaguuucacugacu

SEQ ID NO: 1350 - RNA, 20 nt, Artificial Sequence
  Synthetic
uuucacugacuuagaaccag

SEQ ID NO: 1351 - RNA, 20 nt, Artificial Sequence
  Synthetic
ucacugacuuagaaccaggc

SEQ ID NO: 1352 - RNA, 20 nt, Artificial Sequence
  Synthetic
ccaggcgagagacuuguggc

SEQ ID NO: 1353 - RNA, 20 nt, Artificial Sequence
  Synthetic
caggcgagagacuuguggcc

SEQ ID NO: 1354 - RNA, 20 nt, Artificial Sequence
  Synthetic
aggcgagagacuuguggccu

SEQ ID NO: 1355 - RNA, 20 nt, Artificial Sequence
  Synthetic
gcgagagacuuguggccugg

SEQ ID NO: 1356 - RNA, 20 nt, Artificial Sequence
  Synthetic
agacuuguggccugggagag

SEQ ID NO: 1357 - RNA, 20 nt, Artificial Sequence
  Synthetic
gacuuguggccugggagagc

SEQ ID NO: 1358 - RNA, 20 nt, Artificial Sequence
  Synthetic
acuuguggccugggagagcu

SEQ ID NO: 1359 - RNA, 20 nt, Artificial Sequence
  Synthetic
cuuguggccugggagagcug

SEQ ID NO: 1360 - RNA, 20 nt, Artificial Sequence
  Synthetic
gagcuggggaagcuucuuaa

SEQ ID NO: 1361 - RNA, 20 nt, Artificial Sequence
  Synthetic
gcuggggaagcuucuuaaau

SEQ ID NO: 1362 - RNA, 20 nt, Artificial Sequence
  Synthetic
ggggaagcuucuuaaaugag

SEQ ID NO: 1363 - RNA, 20 nt, Artificial Sequence
  Synthetic
gggaagcuucuuaaaugaga

SEQ ID NO: 1364 - RNA, 20 nt, Artificial Sequence
  Synthetic
cuucuuaaaugagaaggaau

SEQ ID NO: 1365 - RNA, 20 nt, Artificial Sequence
  Synthetic
uaaaugagaaggaauuugag

SEQ ID NO: 1366 - RNA, 20 nt, Artificial Sequence
  Synthetic
ucaucuauugcuggcaaaga

SEQ ID NO: 1367 - RNA, 20 nt, Artificial Sequence
  Synthetic
agccucacugcaagcacugc

SEQ ID NO: 1368 - RNA, 20 nt, Artificial Sequence
  Synthetic
ugcaugggcaagcuuggcug

SEQ ID NO: 1369 - RNA, 20 nt, Artificial Sequence
  Synthetic
augggcaagcuuggcuguag

SEQ ID NO: 1370 - RNA, 20 nt, Artificial Sequence
  Synthetic
ugggcaagcuuggcuguaga

SEQ ID NO: 1371 - RNA, 20 nt, Artificial Sequence
  Synthetic
agcuuggcuguagaaggaga

SEQ ID NO: 1372 - RNA, 20 nt, Artificial Sequence
  Synthetic
guagaaggagacagagcugg

SEQ ID NO: 1373 - RNA, 20 nt, Artificial Sequence
  Synthetic
uagaaggagacagagcuggu

SEQ ID NO: 1374 - RNA, 20 nt, Artificial Sequence
  Synthetic
agaaggagacagagcugguu

SEQ ID NO: 1375 - RNA, 20 nt, Artificial Sequence
  Synthetic
acagagcugguugggaagac

SEQ ID NO: 1376 - RNA, 20 nt, Artificial Sequence
  Synthetic
cagagcugguugggaagaca

SEQ ID NO: 1377 - RNA, 20 nt, Artificial Sequence
  Synthetic
agagcugguugggaagacau

SEQ ID NO: 1378 - RNA, 20 nt, Artificial Sequence
  Synthetic
gagcugguugggaagacaug

SEQ ID NO: 1379 - RNA, 20 nt, Artificial Sequence
  Synthetic
gcugguugggaagacauggg

SEQ ID NO: 1380 - RNA, 20 nt, Artificial Sequence
  Synthetic
cugguugggaagacaugggg

SEQ ID NO: 1381 - RNA, 20 nt, Artificial Sequence
  Synthetic
guugggaagacauggggagg

SEQ ID NO: 1382 - RNA, 20 nt, Artificial Sequence
  Synthetic
aggaaggacaaggcuagauc

SEQ ID NO: 1383 - RNA, 20 nt, Artificial Sequence
  Synthetic
aaggacaaggcuagaucaug

SEQ ID NO: 1384 - RNA, 20 nt, Artificial Sequence
  Synthetic
ggcauugcuccgucuaaguc

SEQ ID NO: 1385 - RNA, 20 nt, Artificial Sequence
  Synthetic
ugcuccgucuaagucaugag

SEQ ID NO: 1386 - RNA, 20 nt, Artificial Sequence
  Synthetic
cgucuaagucaugagcugag

SEQ ID NO: 1387 - RNA, 20 nt, Artificial Sequence
  Synthetic
gucuaagucaugagcugagc

SEQ ID NO: 1388 - RNA, 20 nt, Artificial Sequence
  Synthetic
ucuaagucaugagcugagca

SEQ ID NO: 1389 - RNA, 20 nt, Artificial Sequence
  Synthetic
ggagauccugguugguguug

SEQ ID NO: 1390 - RNA, 20 nt, Artificial Sequence
  Synthetic
gaagguuuacucuguggcca

SEQ ID NO: 1391 - RNA, 20 nt, Artificial Sequence
  Synthetic
aagguuuacucuguggccaa

SEQ ID NO: 1392 - RNA, 20 nt, Artificial Sequence
  Synthetic
gguuuacucuguggccaaag

SEQ ID NO: 1393 - RNA, 20 nt, Artificial Sequence
  Synthetic
cucuguggccaaaggagggu

SEQ ID NO: 1394 - RNA, 20 nt, Artificial Sequence
  Synthetic
ucuguggccaaaggaggguc

SEQ ID NO: 1395 - RNA, 20 nt, Artificial Sequence
  Synthetic
guggccaaaggagggucagg

SEQ ID NO: 1396 - RNA, 20 nt, Artificial Sequence
  Synthetic
ccaaaggagggucaggaagg

SEQ ID NO: 1397 - RNA, 20 nt, Artificial Sequence
  Synthetic
ggucaggaaggaugagcauu

SEQ ID NO: 1398 - RNA, 20 nt, Artificial Sequence
  Synthetic
gaaggaugagcauuuagggc

SEQ ID NO: 1399 - RNA, 20 nt, Artificial Sequence
  Synthetic
aaggaugagcauuuagggca

SEQ ID NO: 1400 - RNA, 20 nt, Artificial Sequence
  Synthetic
accaccaacagcccucaggu

SEQ ID NO: 1401 - RNA, 20 nt, Artificial Sequence
  Synthetic
ccaacagcccucaggucagg

SEQ ID NO: 1402 - RNA, 20 nt, Artificial Sequence
  Synthetic
aacagcccucaggucagggu

SEQ ID NO: 1403 - RNA, 20 nt, Artificial Sequence
  Synthetic
gccucugcuaagcucaaggc

SEQ ID NO: 1404 - RNA, 20 nt, Artificial Sequence
  Synthetic
cucugcuaagcucaaggcgu

SEQ ID NO: 1405 - RNA, 20 nt, Artificial Sequence
  Synthetic
gcuaagcucaaggcgugagg

SEQ ID NO: 1406 - RNA, 20 nt, Artificial Sequence
  Synthetic
cuaagcucaaggcgugagga

SEQ ID NO: 1407 - RNA, 20 nt, Artificial Sequence
  Synthetic
uaagcucaaggcgugaggau

SEQ ID NO: 1408 - RNA, 20 nt, Artificial Sequence
  Synthetic
gcucaaggcgugaggauggg

SEQ ID NO: 1409 - RNA, 20 nt, Artificial Sequence
  Synthetic
cucaaggcgugaggauggga

SEQ ID NO: 1410 - RNA, 20 nt, Artificial Sequence
  Synthetic
caaggcgugaggaugggaag

SEQ ID NO: 1411 - RNA, 20 nt, Artificial Sequence
  Synthetic
aaggcgugaggaugggaagg

SEQ ID NO: 1412 - RNA, 20 nt, Artificial Sequence
  Synthetic
aggcgugaggaugggaagga

SEQ ID NO: 1413 - RNA, 20 nt, Artificial Sequence
  Synthetic
ggaaggagggagguauucgu

SEQ ID NO: 1414 - RNA, 20 nt, Artificial Sequence
  Synthetic
ggagggagguauucguaagg

SEQ ID NO: 1415 - RNA, 20 nt, Artificial Sequence
  Synthetic
gagggagguauucguaagga

SEQ ID NO: 1416 - RNA, 20 nt, Artificial Sequence
  Synthetic
agggagguauucguaaggau

SEQ ID NO: 1417 - RNA, 20 nt, Artificial Sequence
  Synthetic
gagguauucguaaggauggg

SEQ ID NO: 1418 - RNA, 20 nt, Artificial Sequence
  Synthetic
agguauucguaaggauggga

SEQ ID NO: 1419 - RNA, 20 nt, Artificial Sequence
  Synthetic
guauucguaaggaugggaag

SEQ ID NO: 1420 - RNA, 20 nt, Artificial Sequence
  Synthetic
uauucguaaggaugggaagg

SEQ ID NO: 1421 - RNA, 20 nt, Artificial Sequence
  Synthetic
auucguaaggaugggaagga

SEQ ID NO: 1422 - RNA, 20 nt, Artificial Sequence
  Synthetic
gggagguauucgugcagcau

SEQ ID NO: 1423 - RNA, 20 nt, Artificial Sequence
  Synthetic
gagguauucgugcagcauau

SEQ ID NO: 1424 - RNA, 20 nt, Artificial Sequence
  Synthetic
ucgugcagcauaugaggaug

SEQ ID NO: 1425 - RNA, 20 nt, Artificial Sequence
  Synthetic
auaugaggaugcagagucag

SEQ ID NO: 1426 - RNA, 20 nt, Artificial Sequence
  Synthetic
aggaugcagagucagcagaa

SEQ ID NO: 1427 - RNA, 20 nt, Artificial Sequence
  Synthetic
ggaugcagagucagcagaac

SEQ ID NO: 1428 - RNA, 20 nt, Artificial Sequence
  Synthetic
gcagagucagcagaacuggg

SEQ ID NO: 1429 - RNA, 20 nt, Artificial Sequence
  Synthetic
ucagcagaacugggguggau

SEQ ID NO: 1430 - RNA, 20 nt, Artificial Sequence
  Synthetic
agaacugggguggauuuggg

SEQ ID NO: 1431 - RNA, 20 nt, Artificial Sequence
  Synthetic
gaacugggguggauuugggu

SEQ ID NO: 1432 - RNA, 20 nt, Artificial Sequence
  Synthetic
gggguggauuuggguuggaa

SEQ ID NO: 1433 - RNA, 20 nt, Artificial Sequence
  Synthetic
gguggauuuggguuggaagu

SEQ ID NO: 1434 - RNA, 20 nt, Artificial Sequence
  Synthetic
uuuggguuggaagugagggu

SEQ ID NO: 1435 - RNA, 20 nt, Artificial Sequence
  Synthetic
uggguuggaagugaggguca

SEQ ID NO: 1436 - RNA, 20 nt, Artificial Sequence
  Synthetic
gguuggaagugagggucaga

SEQ ID NO: 1437 - RNA, 20 nt, Artificial Sequence
  Synthetic
guuggaagugagggucagag

SEQ ID NO: 1438 - RNA, 20 nt, Artificial Sequence
  Synthetic
agugagggucagagaggagu

SEQ ID NO: 1439 - RNA, 20 nt, Artificial Sequence
  Synthetic
ugagggucagagaggaguca

SEQ ID NO: 1440 - RNA, 20 nt, Artificial Sequence
  Synthetic
agggucagagaggagucaga

SEQ ID NO: 1441 - RNA, 20 nt, Artificial Sequence
  Synthetic
aucccuagucuucaagcaga

SEQ ID NO: 1442 - RNA, 20 nt, Artificial Sequence
  Synthetic
ucccuagucuucaagcagau

SEQ ID NO: 1443 - RNA, 20 nt, Artificial Sequence
  Synthetic
ccuagucuucaagcagauug

SEQ ID NO: 1444 - RNA, 20 nt, Artificial Sequence
  Synthetic
caagcagauuggagaaaccc

SEQ ID NO: 1445 - RNA, 20 nt, Artificial Sequence
  Synthetic
ccuugaaaagacaucaagca

SEQ ID NO: 1446 - RNA, 20 nt, Artificial Sequence
  Synthetic
ugaaaagacaucaagcacag

SEQ ID NO: 1447 - RNA, 20 nt, Artificial Sequence
  Synthetic
gaaaagacaucaagcacaga

SEQ ID NO: 1448 - RNA, 20 nt, Artificial Sequence
  Synthetic
aaagacaucaagcacagaag

SEQ ID NO: 1449 - RNA, 20 nt, Artificial Sequence
  Synthetic
aagacaucaagcacagaagg

SEQ ID NO: 1450 - RNA, 20 nt, Artificial Sequence
  Synthetic
gacaucaagcacagaaggag

SEQ ID NO: 1451 - RNA, 20 nt, Artificial Sequence
  Synthetic
acaucaagcacagaaggagg

SEQ ID NO: 1452 - RNA, 20 nt, Artificial Sequence
  Synthetic
aucaagcacagaaggaggag

SEQ ID NO: 1453 - RNA, 20 nt, Artificial Sequence
  Synthetic
ucaagcacagaaggaggagg

SEQ ID NO: 1454 - RNA, 20 nt, Artificial Sequence
  Synthetic
aggaggaggagguuuagguc

SEQ ID NO: 1455 - RNA, 20 nt, Artificial Sequence
  Synthetic
aggaggagguuuaggucaag

SEQ ID NO: 1456 - RNA, 20 nt, Artificial Sequence
  Synthetic
agguuuaggucaagaagaag

SEQ ID NO: 1457 - RNA, 20 nt, Artificial Sequence
  Synthetic
aagaagauggauugguguaa

SEQ ID NO: 1458 - RNA, 20 nt, Artificial Sequence
  Synthetic
agauggauugguguaaaagg

SEQ ID NO: 1459 - RNA, 20 nt, Artificial Sequence
  Synthetic
aaaaggaugggucugguuug

SEQ ID NO: 1460 - RNA, 20 nt, Artificial Sequence
  Synthetic
augggucugguuugcagagc

SEQ ID NO: 1461 - RNA, 20 nt, Artificial Sequence
  Synthetic
agacuccaggcugucuuuca

SEQ ID NO: 1462 - RNA, 20 nt, Artificial Sequence
  Synthetic
agauuuccuucccaucccag

SEQ ID NO: 1463 - RNA, 20 nt, Artificial Sequence
  Synthetic
uucccaucccagcugaaaua

SEQ ID NO: 1464 - RNA, 20 nt, Artificial Sequence
  Synthetic
cccaucccagcugaaauacu

SEQ ID NO: 1465 - RNA, 20 nt, Artificial Sequence
  Synthetic
ccaucccagcugaaauacug

SEQ ID NO: 1466 - RNA, 20 nt, Artificial Sequence
  Synthetic
cugaaauacugaggggucuc

SEQ ID NO: 1467 - RNA, 20 nt, Artificial Sequence
  Synthetic
ugaaauacugaggggucucc

SEQ ID NO: 1468 - RNA, 20 nt, Artificial Sequence
  Synthetic
aaauacugaggggucuccag

SEQ ID NO: 1469 - RNA, 20 nt, Artificial Sequence
  Synthetic
aauacugaggggucuccagg

SEQ ID NO: 1470 - RNA, 20 nt, Artificial Sequence
  Synthetic
uccaggaggagacuagauuu

SEQ ID NO: 1471 - RNA, 20 nt, Artificial Sequence
  Synthetic
gagacuagauuuaugaauac

SEQ ID NO: 1472 - RNA, 20 nt, Artificial Sequence
  Synthetic
gauuuaugaauacacgaggu

SEQ ID NO: 1473 - RNA, 20 nt, Artificial Sequence
  Synthetic
aauacacgagguaugagguc

SEQ ID NO: 1474 - RNA, 20 nt, Artificial Sequence
  Synthetic
auacacgagguaugaggucu

SEQ ID NO: 1475 - RNA, 20 nt, Artificial Sequence
  Synthetic
gaacauacuucagcucacac

SEQ ID NO: 1476 - RNA, 20 nt, Artificial Sequence
  Synthetic
agcucacacaugagaucuag

SEQ ID NO: 1477 - RNA, 20 nt, Artificial Sequence
  Synthetic
cucacacaugagaucuaggu

SEQ ID NO: 1478 - RNA, 20 nt, Artificial Sequence
  Synthetic
gauuaccuaguagucauuuc

SEQ ID NO: 1479 - RNA, 20 nt, Artificial Sequence
  Synthetic
aguagucauuucauggguug

SEQ ID NO: 1480 - RNA, 20 nt, Artificial Sequence
  Synthetic
guagucauuucauggguugu

SEQ ID NO: 1481 - RNA, 20 nt, Artificial Sequence
  Synthetic
uagucauuucauggguuguu

SEQ ID NO: 1482 - RNA, 20 nt, Artificial Sequence
  Synthetic
gucauuucauggguuguugg

SEQ ID NO: 1483 - RNA, 20 nt, Artificial Sequence
  Synthetic
uggguuguugggaggauucu

SEQ ID NO: 1484 - RNA, 20 nt, Artificial Sequence
  Synthetic
caaacucuuaguuacucauu

SEQ ID NO: 1485 - RNA, 20 nt, Artificial Sequence
  Synthetic
aaacucuuaguuacucauuc

SEQ ID NO: 1486 - RNA, 20 nt, Artificial Sequence
  Synthetic
uuacucauucagggauagca

SEQ ID NO: 1487 - RNA, 20 nt, Artificial Sequence
  Synthetic
ggauagcacugagcaaagca

SEQ ID NO: 1488 - RNA, 20 nt, Artificial Sequence
  Synthetic
acugagcaaagcauugagca

SEQ ID NO: 1489 - RNA, 20 nt, Artificial Sequence
  Synthetic
cugagcaaagcauugagcaa

SEQ ID NO: 1490 - RNA, 20 nt, Artificial Sequence
  Synthetic
cauugagcaaagggguccca

SEQ ID NO: 1491 - RNA, 20 nt, Artificial Sequence
  Synthetic
agcaaaggggucccauagag

SEQ ID NO: 1492 - RNA, 20 nt, Artificial Sequence
  Synthetic
caaaggggucccauagaggu

SEQ ID NO: 1493 - RNA, 20 nt, Artificial Sequence
  Synthetic
aaaggggucccauagaggug

SEQ ID NO: 1494 - RNA, 20 nt, Artificial Sequence
  Synthetic
aaggggucccauagagguga

SEQ ID NO: 1495 - RNA, 20 nt, Artificial Sequence
  Synthetic
cccauagaggugagggaagc

SEQ ID NO: 1496 - RNA, 20 nt, Artificial Sequence
  Synthetic
cauuuaaccgucaauaggca

SEQ ID NO: 1497 - RNA, 20 nt, Artificial Sequence
  Synthetic
auuuaaccgucaauaggcaa

SEQ ID NO: 1498 - RNA, 20 nt, Artificial Sequence
  Synthetic
uuuaaccgucaauaggcaaa

SEQ ID NO: 1499 - RNA, 20 nt, Artificial Sequence
  Synthetic
uuaaccgucaauaggcaaag

SEQ ID NO: 1500 - RNA, 20 nt, Artificial Sequence
  Synthetic
uaaccgucaauaggcaaagg

SEQ ID NO: 1501 - RNA, 20 nt, Artificial Sequence
  Synthetic
aaccgucaauaggcaaaggg

SEQ ID NO: 1502 - RNA, 20 nt, Artificial Sequence
  Synthetic
cgucaauaggcaaagggggg

SEQ ID NO: 1503 - RNA, 20 nt, Artificial Sequence
  Synthetic
gucaauaggcaaagggggga

SEQ ID NO: 1504 - RNA, 20 nt, Artificial Sequence
  Synthetic
gggggaagggacauauucau

SEQ ID NO: 1505 - RNA, 20 nt, Artificial Sequence
  Synthetic
ggggaagggacauauucauu

SEQ ID NO: 1506 - RNA, 20 nt, Artificial Sequence
  Synthetic
ucauuuggaaauaagcugcc

SEQ ID NO: 1507 - RNA, 20 nt, Artificial Sequence
  Synthetic
accagccuccguauuucaga

SEQ ID NO: 1508 - RNA, 20 nt, Artificial Sequence
  Synthetic
gccuccguauuucagacuga

SEQ ID NO: 1509 - RNA, 20 nt, Artificial Sequence
  Synthetic
ccuccguauuucagacugaa

SEQ ID NO: 1510 - RNA, 20 nt, Artificial Sequence
  Synthetic
cuccguauuucagacugaau

SEQ ID NO: 1511 - RNA, 20 nt, Artificial Sequence
  Synthetic
guauuucagacugaaugggg

SEQ ID NO: 1512 - RNA, 20 nt, Artificial Sequence
  Synthetic
uauuucagacugaauggggg

SEQ ID NO: 1513 - RNA, 20 nt, Artificial Sequence
  Synthetic
auuucagacugaaugggggu

SEQ ID NO: 1514 - RNA, 20 nt, Artificial Sequence
  Synthetic
uuucagacugaaugggggug

SEQ ID NO: 1515 - RNA, 20 nt, Artificial Sequence
  Synthetic
uucagacugaaugggggugg

SEQ ID NO: 1516 - RNA, 20 nt, Artificial Sequence
  Synthetic
ucagacugaauggggguggg

SEQ ID NO: 1517 - RNA, 20 nt, Artificial Sequence
  Synthetic
gaugccuucuccagacaaac

SEQ ID NO: 1518 - RNA, 20 nt, Artificial Sequence
  Synthetic
uccagacaaaccagaagcaa

SEQ ID NO: 1519 - RNA, 20 nt, Artificial Sequence
  Synthetic
aaaaucgucucucccucccu

SEQ ID NO: 1520 - RNA, 20 nt, Artificial Sequence
  Synthetic
cgucucucccucccuuugaa

SEQ ID NO: 1521 - RNA, 20 nt, Artificial Sequence
  Synthetic
augaauauaccccuuagugu

SEQ ID NO: 1522 - RNA, 20 nt, Artificial Sequence
  Synthetic
guuuggguauauucauuuca

SEQ ID NO: 1523 - RNA, 20 nt, Artificial Sequence
  Synthetic
uuuggguauauucauuucaa

SEQ ID NO: 1524 - RNA, 20 nt, Artificial Sequence
  Synthetic
uuggguauauucauuucaaa

SEQ ID NO: 1525 - RNA, 20 nt, Artificial Sequence
  Synthetic
ggguauauucauuucaaagg

SEQ ID NO: 1526 - RNA, 20 nt, Artificial Sequence
  Synthetic
guauauucauuucaaaggga

SEQ ID NO: 1527 - RNA, 20 nt, Artificial Sequence
  Synthetic
auauucauuucaaagggaga

SEQ ID NO: 1528 - RNA, 20 nt, Artificial Sequence
  Synthetic
auucauuucaaagggagaga

SEQ ID NO: 1529 - RNA, 20 nt, Artificial Sequence
  Synthetic
ucauaugauugugcacauac

SEQ ID NO: 1530 - RNA, 20 nt, Artificial Sequence
  Synthetic
ugcacauacuugagacuguu

SEQ ID NO: 1531 - RNA, 20 nt, Artificial Sequence
  Synthetic
uacuugagacuguuuugaau

SEQ ID NO: 1532 - RNA, 20 nt, Artificial Sequence
  Synthetic
acuugagacuguuuugaauu

SEQ ID NO: 1533 - RNA, 20 nt, Artificial Sequence
  Synthetic
cuugagacuguuuugaauuu

SEQ ID NO: 1534 - RNA, 20 nt, Artificial Sequence
  Synthetic
uugagacuguuuugaauuug

SEQ ID NO: 1535 - RNA, 20 nt, Artificial Sequence
  Synthetic
accaucauaguacagguaag

SEQ ID NO: 1536 - RNA, 20 nt, Artificial Sequence
  Synthetic
caucauaguacagguaaggu

SEQ ID NO: 1537 - RNA, 20 nt, Artificial Sequence
  Synthetic
aucauaguacagguaaggug

SEQ ID NO: 1538 - RNA, 20 nt, Artificial Sequence
  Synthetic
ucauaguacagguaagguga

SEQ ID NO: 1539 - RNA, 20 nt, Artificial Sequence
  Synthetic
aggugagggaauaguaagug

SEQ ID NO: 1540 - RNA, 20 nt, Artificial Sequence
  Synthetic
gugagggaauaguaaguggu

SEQ ID NO: 1541 - RNA, 20 nt, Artificial Sequence
  Synthetic
aguaaguggugagaacuacu

SEQ ID NO: 1542 - RNA, 20 nt, Artificial Sequence
  Synthetic
guaaguggugagaacuacuc

SEQ ID NO: 1543 - RNA, 20 nt, Artificial Sequence
  Synthetic
uaaguggugagaacuacuca

SEQ ID NO: 1544 - RNA, 20 nt, Artificial Sequence
  Synthetic
uggugagaacuacucaggga

SEQ ID NO: 1545 - RNA, 20 nt, Artificial Sequence
  Synthetic
uacucagggaaugaaggugu

SEQ ID NO: 1546 - RNA, 20 nt, Artificial Sequence
  Synthetic
aaugaaggugucagaauaau

SEQ ID NO: 1547 - RNA, 20 nt, Artificial Sequence
  Synthetic
gcuacugacuuucucagccu

SEQ ID NO: 1548 - RNA, 20 nt, Artificial Sequence
  Synthetic
gacuuucucagccucugaau

SEQ ID NO: 1549 - RNA, 20 nt, Artificial Sequence
  Synthetic
ucagccucugaauaugaacg

SEQ ID NO: 1550 - RNA, 20 nt, Artificial Sequence
  Synthetic
gugagcauuguggcugucag

SEQ ID NO: 1551 - RNA, 20 nt, Artificial Sequence
  Synthetic
ugagcauuguggcugucagc

SEQ ID NO: 1552 - RNA, 20 nt, Artificial Sequence
  Synthetic
guggcugucagcaggaagca

SEQ ID NO: 1553 - RNA, 20 nt, Artificial Sequence
  Synthetic
gcugucagcaggaagcaacg

SEQ ID NO: 1554 - RNA, 20 nt, Artificial Sequence
  Synthetic
cugucagcaggaagcaacga

SEQ ID NO: 1555 - RNA, 20 nt, Artificial Sequence
  Synthetic
ugucagcaggaagcaacgaa

SEQ ID NO: 1556 - RNA, 20 nt, Artificial Sequence
  Synthetic
uuuccuuuugcucuuaaguu

SEQ ID NO: 1557 - RNA, 20 nt, Artificial Sequence
  Synthetic
uuccuuuugcucuuaaguug

SEQ ID NO: 1558 - RNA, 20 nt, Artificial Sequence
  Synthetic
ccuuuugcucuuaaguugug

SEQ ID NO: 1559 - RNA, 20 nt, Artificial Sequence
  Synthetic
uggagagugcaacaguagca

SEQ ID NO: 1560 - RNA, 20 nt, Artificial Sequence
  Synthetic
guagcauaggacccuacccu

SEQ ID NO: 1561 - RNA, 20 nt, Artificial Sequence
  Synthetic
auuugcauauucuuauguau

SEQ ID NO: 1562 - RNA, 20 nt, Artificial Sequence
  Synthetic
augugaaaguuacaaauugc

SEQ ID NO: 1563 - RNA, 20 nt, Artificial Sequence
  Synthetic
gaaaguuacaaauugcuuga

SEQ ID NO: 1564 - RNA, 17 nt, Artificial Sequence
  Synthetic
uacagucaguaucaauu

SEQ ID NO: 1565 - RNA, 17 nt, Artificial Sequence
  Synthetic
acagucaguaucaauuc

SEQ ID NO: 1566 - RNA, 17 nt, Artificial Sequence
  Synthetic
gucaguaucaauucugg

SEQ ID NO: 1567 - RNA, 17 nt, Artificial Sequence
  Synthetic
cauuaaagauagucauc

SEQ ID NO: 1568 - RNA, 17 nt, Artificial Sequence
  Synthetic
auuaaagauagucaucu

SEQ ID NO: 1569 - RNA, 17 nt, Artificial Sequence
  Synthetic
ucauggucaucugcuac

SEQ ID NO: 1570 - RNA, 17 nt, Artificial Sequence
  Synthetic
cauggucaucugcuacu

SEQ ID NO: 1571 - RNA, 17 nt, Artificial Sequence
  Synthetic
auggucaucugcuacuc

SEQ ID NO: 1572 - RNA, 17 nt, Artificial Sequence
  Synthetic
aaaacucugcuucggug

SEQ ID NO: 1573 - RNA, 17 nt, Artificial Sequence
  Synthetic
ucugcuucggugucgaa

SEQ ID NO: 1574 - RNA, 17 nt, Artificial Sequence
  Synthetic
ugcuucggugucgaaau

SEQ ID NO: 1575 - RNA, 17 nt, Artificial Sequence
  Synthetic
uucggugucgaaaugag

SEQ ID NO: 1576 - RNA, 17 nt, Artificial Sequence
  Synthetic
ggugucgaaaugagaag

SEQ ID NO: 1577 - RNA, 17 nt, Artificial Sequence
  Synthetic
aaugagaagaagaggca

SEQ ID NO: 1578 - RNA, 17 nt, Artificial Sequence
  Synthetic
agaagaggcacagggcu

SEQ ID NO: 1579 - RNA, 17 nt, Artificial Sequence
  Synthetic
auuguuuauuuucucuu

SEQ ID NO: 1580 - RNA, 17 nt, Artificial Sequence
  Synthetic
acaacauuguccuucuc

SEQ ID NO: 1581 - RNA, 17 nt, Artificial Sequence
  Synthetic
uucuccugaacaccuuc

SEQ ID NO: 1582 - RNA, 17 nt, Artificial Sequence
  Synthetic
ucuccugaacaccuucc

SEQ ID NO: 1583 - RNA, 17 nt, Artificial Sequence
  Synthetic
uccaggaauucuuuggc

SEQ ID NO: 1584 - RNA, 17 nt, Artificial Sequence
  Synthetic
gcaguagcucuaacagg

SEQ ID NO: 1585 - RNA, 17 nt, Artificial Sequence
  Synthetic
ccaagcuaugcagguga

SEQ ID NO: 1586 - RNA, 17 nt, Artificial Sequence
  Synthetic
gcaggugacagagacuc

SEQ ID NO: 1587 - RNA, 17 nt, Artificial Sequence
  Synthetic
caggugacagagacucu

SEQ ID NO: 1588 - RNA, 17 nt, Artificial Sequence
  Synthetic
caucaucuaugccuuug

SEQ ID NO: 1589 - RNA, 17 nt, Artificial Sequence
  Synthetic
aucaucuaugccuuugu

SEQ ID NO: 1590 - RNA, 17 nt, Artificial Sequence
  Synthetic
ucaucuaugccuuuguc

SEQ ID NO: 1591 - RNA, 17 nt, Artificial Sequence
  Synthetic
caucuaugccuuugucg

SEQ ID NO: 1592 - RNA, 17 nt, Artificial Sequence
  Synthetic
ucuaugccuuugucggg

SEQ ID NO: 1593 - RNA, 17 nt, Artificial Sequence
  Synthetic
uuugucggggagaaguu

SEQ ID NO: 1594 - RNA, 17 nt, Artificial Sequence
  Synthetic
cuguucuauuuuccagc

SEQ ID NO: 1595 - RNA, 17 nt, Artificial Sequence
  Synthetic
uuuccagcaagaggcuc

SEQ ID NO: 1596 - RNA, 17 nt, Artificial Sequence
  Synthetic
cagcaagaggcucccga

SEQ ID NO: 1597 - RNA, 17 nt, Artificial Sequence
  Synthetic
aguuuacacccgaucca

SEQ ID NO: 1598 - RNA, 17 nt, Artificial Sequence
  Synthetic
guuuacacccgauccac

SEQ ID NO: 1599 - RNA, 17 nt, Artificial Sequence
  Synthetic
uuuacacccgauccacu

SEQ ID NO: 1600 - RNA, 17 nt, Artificial Sequence
  Synthetic
uuacacccgauccacug

SEQ ID NO: 1601 - RNA, 17 nt, Artificial Sequence
  Synthetic
cccgauccacuggggag

SEQ ID NO: 1602 - RNA, 17 nt, Artificial Sequence
  Synthetic
ccgauccacuggggagc

SEQ ID NO: 1603 - RNA, 17 nt, Artificial Sequence
  Synthetic
gggagcaggaaauaucu

SEQ ID NO: 1604 - RNA, 17 nt, Artificial Sequence
  Synthetic
aucugugggcuugugac

SEQ ID NO: 1605 - RNA, 17 nt, Artificial Sequence
  Synthetic
uugugacacggacucaa

SEQ ID NO: 1606 - RNA, 17 nt, Artificial Sequence
  Synthetic
ugggcuggugacccagu

SEQ ID NO: 1607 - RNA, 17 nt, Artificial Sequence
  Synthetic
uaguuuucauacacagc

SEQ ID NO: 1608 - RNA, 17 nt, Artificial Sequence
  Synthetic
uucauacacagccuggg

SEQ ID NO: 1609 - RNA, 17 nt, Artificial Sequence
  Synthetic
ucauacacagccugggc

SEQ ID NO: 1610 - RNA, 17 nt, Artificial Sequence
  Synthetic
cauacacagccugggcu

SEQ ID NO: 1611 - RNA, 17 nt, Artificial Sequence
  Synthetic
cacagccugggcugggg

SEQ ID NO: 1612 - RNA, 17 nt, Artificial Sequence
  Synthetic
acagccugggcuggggg

SEQ ID NO: 1613 - RNA, 17 nt, Artificial Sequence
  Synthetic
ccugggcuggggguggg

SEQ ID NO: 1614 - RNA, 17 nt, Artificial Sequence
  Synthetic
cugggcugggggugggg

SEQ ID NO: 1615 - RNA, 17 nt, Artificial Sequence
  Synthetic
ugggcuggggguggggu

SEQ ID NO: 1616 - RNA, 17 nt, Artificial Sequence
  Synthetic
ggcuggggguggggugg

SEQ ID NO: 1617 - RNA, 17 nt, Artificial Sequence
  Synthetic
ggagaggucuuuuuuaa

SEQ ID NO: 1618 - RNA, 17 nt, Artificial Sequence
  Synthetic
gagaggucuuuuuuaaa

SEQ ID NO: 1619 - RNA, 17 nt, Artificial Sequence
  Synthetic
aaaggaaguuacuguua

SEQ ID NO: 1620 - RNA, 17 nt, Artificial Sequence
  Synthetic
aggaaguuacuguuaua

SEQ ID NO: 1621 - RNA, 17 nt, Artificial Sequence
  Synthetic
uuuaagcccaucaauua

SEQ ID NO: 1622 - RNA, 17 nt, Artificial Sequence
  Synthetic
caaaucaaaauauguug

SEQ ID NO: 1623 - RNA, 17 nt, Artificial Sequence
  Synthetic
caaacucucccuucacu

SEQ ID NO: 1624 - RNA, 17 nt, Artificial Sequence
  Synthetic
uccuuauguauauuuaa

SEQ ID NO: 1625 - RNA, 17 nt, Artificial Sequence
  Synthetic
uauuuaaaagaaagccu

SEQ ID NO: 1626 - RNA, 17 nt, Artificial Sequence
  Synthetic
uuuaaaagaaagccuca

SEQ ID NO: 1627 - RNA, 17 nt, Artificial Sequence
  Synthetic
cagagaauugcugauuc

SEQ ID NO: 1628 - RNA, 17 nt, Artificial Sequence
  Synthetic
uucuugaguuuagugau

SEQ ID NO: 1629 - RNA, 17 nt, Artificial Sequence
  Synthetic
gaguuuagugaucugaa

SEQ ID NO: 1630 - RNA, 17 nt, Artificial Sequence
  Synthetic
aaauaccaaaauuauuu

SEQ ID NO: 1631 - RNA, 17 nt, Artificial Sequence
  Synthetic
caggucuuugucuugcu

SEQ ID NO: 1632 - RNA, 17 nt, Artificial Sequence
  Synthetic
aggucuuugucuugcua

SEQ ID NO: 1633 - RNA, 17 nt, Artificial Sequence
  Synthetic
ggucuuugucuugcuau

SEQ ID NO: 1634 - RNA, 17 nt, Artificial Sequence
  Synthetic
gucuuugucuugcuaug

SEQ ID NO: 1635 - RNA, 17 nt, Artificial Sequence
  Synthetic
cuuugucuugcuauggg

SEQ ID NO: 1636 - RNA, 17 nt, Artificial Sequence
  Synthetic
cuauggggagaaaagac

SEQ ID NO: 1637 - RNA, 17 nt, Artificial Sequence
  Synthetic
caugaauaugauuagua

SEQ ID NO: 1638 - RNA, 17 nt, Artificial Sequence
  Synthetic
aauaaguuucacugacu

SEQ ID NO: 1639 - RNA, 17 nt, Artificial Sequence
  Synthetic
cacugacuuagaaccag

SEQ ID NO: 1640 - RNA, 17 nt, Artificial Sequence
  Synthetic
cugacuuagaaccaggc

SEQ ID NO: 1641 - RNA, 17 nt, Artificial Sequence
  Synthetic
ggcgagagacuuguggc

SEQ ID NO: 1642 - RNA, 17 nt, Artificial Sequence
  Synthetic
gcgagagacuuguggcc

SEQ ID NO: 1643 - RNA, 17 nt, Artificial Sequence
  Synthetic
cgagagacuuguggccu

SEQ ID NO: 1644 - RNA, 17 nt, Artificial Sequence
  Synthetic
agagacuuguggccugg

SEQ ID NO: 1645 - RNA, 17 nt, Artificial Sequence
  Synthetic
cuuguggccugggagag

SEQ ID NO: 1646 - RNA, 17 nt, Artificial Sequence
  Synthetic
uuguggccugggagagc

SEQ ID NO: 1647 - RNA, 17 nt, Artificial Sequence
  Synthetic
uguggccugggagagcu

SEQ ID NO: 1648 - RNA, 17 nt, Artificial Sequence
  Synthetic
guggccugggagagcug

SEQ ID NO: 1649 - RNA, 17 nt, Artificial Sequence
  Synthetic
cuggggaagcuucuuaa

SEQ ID NO: 1650 - RNA, 17 nt, Artificial Sequence
  Synthetic
ggggaagcuucuuaaau

SEQ ID NO: 1651 - RNA, 17 nt, Artificial Sequence
  Synthetic
gaagcuucuuaaaugag

SEQ ID NO: 1652 - RNA, 17 nt, Artificial Sequence
  Synthetic
aagcuucuuaaaugaga

SEQ ID NO: 1653 - RNA, 17 nt, Artificial Sequence
  Synthetic
cuuaaaugagaaggaau

SEQ ID NO: 1654 - RNA, 17 nt, Artificial Sequence
  Synthetic
augagaaggaauuugag

SEQ ID NO: 1655 - RNA, 17 nt, Artificial Sequence
  Synthetic
ucuauugcuggcaaaga

SEQ ID NO: 1656 - RNA, 17 nt, Artificial Sequence
  Synthetic
cucacugcaagcacugc

SEQ ID NO: 1657 - RNA, 17 nt, Artificial Sequence
  Synthetic
augggcaagcuuggcug

SEQ ID NO: 1658 - RNA, 17 nt, Artificial Sequence
  Synthetic
ggcaagcuuggcuguag

SEQ ID NO: 1659 - RNA, 17 nt, Artificial Sequence
  Synthetic
gcaagcuuggcuguaga

SEQ ID NO: 1660 - RNA, 17 nt, Artificial Sequence
  Synthetic
uuggcuguagaaggaga

SEQ ID NO: 1661 - RNA, 17 nt, Artificial Sequence
  Synthetic
gaaggagacagagcugg

SEQ ID NO: 1662 - RNA, 17 nt, Artificial Sequence
  Synthetic
aaggagacagagcuggu

SEQ ID NO: 1663 - RNA, 17 nt, Artificial Sequence
  Synthetic
aggagacagagcugguu

SEQ ID NO: 1664 - RNA, 17 nt, Artificial Sequence
  Synthetic
gagcugguugggaagac

SEQ ID NO: 1665 - RNA, 17 nt, Artificial Sequence
  Synthetic
agcugguugggaagaca

SEQ ID NO: 1666 - RNA, 17 nt, Artificial Sequence
  Synthetic
gcugguugggaagacau

SEQ ID NO: 1667 - RNA, 17 nt, Artificial Sequence
  Synthetic
cugguugggaagacaug

SEQ ID NO: 1668 - RNA, 17 nt, Artificial Sequence
  Synthetic
gguugggaagacauggg

SEQ ID NO: 1669 - RNA, 17 nt, Artificial Sequence
  Synthetic
guugggaagacaugggg

SEQ ID NO: 1670 - RNA, 17 nt, Artificial Sequence
  Synthetic
gggaagacauggggagg

SEQ ID NO: 1671 - RNA, 17 nt, Artificial Sequence
  Synthetic
aaggacaaggcuagauc

SEQ ID NO: 1672 - RNA, 17 nt, Artificial Sequence
  Synthetic
gacaaggcuagaucaug

SEQ ID NO: 1673 - RNA, 17 nt, Artificial Sequence
  Synthetic
auugcuccgucuaaguc

SEQ ID NO: 1674 - RNA, 17 nt, Artificial Sequence
  Synthetic
uccgucuaagucaugag

SEQ ID NO: 1675 - RNA, 17 nt, Artificial Sequence
  Synthetic
cuaagucaugagcugag

SEQ ID NO: 1676 - RNA, 17 nt, Artificial Sequence
  Synthetic
uaagucaugagcugagc

SEQ ID NO: 1677 - RNA, 17 nt, Artificial Sequence
  Synthetic
aagucaugagcugagca

SEQ ID NO: 1678 - RNA, 17 nt, Artificial Sequence
  Synthetic
gauccugguugguguug

SEQ ID NO: 1679 - RNA, 17 nt, Artificial Sequence
  Synthetic
gguuuacucuguggcca

SEQ ID NO: 1680 - RNA, 17 nt, Artificial Sequence
  Synthetic
guuuacucuguggccaa

SEQ ID NO: 1681 - RNA, 17 nt, Artificial Sequence
  Synthetic
uuacucuguggccaaag

SEQ ID NO: 1682 - RNA, 17 nt, Artificial Sequence
  Synthetic
uguggccaaaggagggu

SEQ ID NO: 1683 - RNA, 17 nt, Artificial Sequence
  Synthetic
guggccaaaggaggguc

SEQ ID NO: 1684 - RNA, 17 nt, Artificial Sequence
  Synthetic
gccaaaggagggucagg

SEQ ID NO: 1685 - RNA, 17 nt, Artificial Sequence
  Synthetic
aaggagggucaggaagg

SEQ ID NO: 1686 - RNA, 17 nt, Artificial Sequence
  Synthetic
caggaaggaugagcauu

SEQ ID NO: 1687 - RNA, 17 nt, Artificial Sequence
  Synthetic
ggaugagcauuuagggc

SEQ ID NO: 1688 - RNA, 17 nt, Artificial Sequence
  Synthetic
gaugagcauuuagggca

SEQ ID NO: 1689 - RNA, 17 nt, Artificial Sequence
  Synthetic
accaacagcccucaggu

SEQ ID NO: 1690 - RNA, 17 nt, Artificial Sequence
  Synthetic
acagcccucaggucagg

SEQ ID NO: 1691 - RNA, 17 nt, Artificial Sequence
  Synthetic
agcccucaggucagggu

SEQ ID NO: 1692 - RNA, 17 nt, Artificial Sequence
  Synthetic
ucugcuaagcucaaggc

SEQ ID NO: 1693 - RNA, 17 nt, Artificial Sequence
  Synthetic
ugcuaagcucaaggcgu

SEQ ID NO: 1694 - RNA, 17 nt, Artificial Sequence
  Synthetic
aagcucaaggcgugagg

SEQ ID NO: 1695 - RNA, 17 nt, Artificial Sequence
  Synthetic
agcucaaggcgugagga

SEQ ID NO: 1696 - RNA, 17 nt, Artificial Sequence
  Synthetic
gcucaaggcgugaggau

SEQ ID NO: 1697 - RNA, 17 nt, Artificial Sequence
  Synthetic
caaggcgugaggauggg

SEQ ID NO: 1698 - RNA, 17 nt, Artificial Sequence
  Synthetic
aaggcgugaggauggga

SEQ ID NO: 1699 - RNA, 17 nt, Artificial Sequence
  Synthetic
ggcgugaggaugggaag

SEQ ID NO: 1700 - RNA, 17 nt, Artificial Sequence
  Synthetic
gcgugaggaugggaagg

SEQ ID NO: 1701 - RNA, 17 nt, Artificial Sequence
  Synthetic
cgugaggaugggaagga

SEQ ID NO: 1702 - RNA, 17 nt, Artificial Sequence
  Synthetic
aggagggagguauucgu

SEQ ID NO: 1703 - RNA, 17 nt, Artificial Sequence
  Synthetic
gggagguauucguaagg

SEQ ID NO: 1704 - RNA, 17 nt, Artificial Sequence
  Synthetic
ggagguauucguaagga

SEQ ID NO: 1705 - RNA, 17 nt, Artificial Sequence
  Synthetic
gagguauucguaaggau

SEQ ID NO: 1706 - RNA, 17 nt, Artificial Sequence
  Synthetic
guauucguaaggauggg

SEQ ID NO: 1707 - RNA, 17 nt, Artificial Sequence
  Synthetic
uauucguaaggauggga

SEQ ID NO: 1708 - RNA, 17 nt, Artificial Sequence
  Synthetic
uucguaaggaugggaag

SEQ ID NO: 1709 - RNA, 17 nt, Artificial Sequence
  Synthetic
ucguaaggaugggaagg

SEQ ID NO: 1710 - RNA, 17 nt, Artificial Sequence
  Synthetic
cguaaggaugggaagga

SEQ ID NO: 1711 - RNA, 17 nt, Artificial Sequence
  Synthetic
agguauucgugcagcau

SEQ ID NO: 1712 - RNA, 17 nt, Artificial Sequence
  Synthetic
guauucgugcagcauau

SEQ ID NO: 1713 - RNA, 17 nt, Artificial Sequence
  Synthetic
ugcagcauaugaggaug

SEQ ID NO: 1714 - RNA, 17 nt, Artificial Sequence
  Synthetic
ugaggaugcagagucag

SEQ ID NO: 1715 - RNA, 17 nt, Artificial Sequence
  Synthetic
augcagagucagcagaa

SEQ ID NO: 1716 - RNA, 17 nt, Artificial Sequence
  Synthetic
ugcagagucagcagaac

SEQ ID NO: 1717 - RNA, 17 nt, Artificial Sequence
  Synthetic
gagucagcagaacuggg

SEQ ID NO: 1718 - RNA, 17 nt, Artificial Sequence
  Synthetic
gcagaacugggguggau

SEQ ID NO: 1719 - RNA, 17 nt, Artificial Sequence
  Synthetic
acugggguggauuuggg

SEQ ID NO: 1720 - RNA, 17 nt, Artificial Sequence
  Synthetic
cugggguggauuugggu

SEQ ID NO: 1721 - RNA, 17 nt, Artificial Sequence
  Synthetic
guggauuuggguuggaa

SEQ ID NO: 1722 - RNA, 17 nt, Artificial Sequence
  Synthetic
ggauuuggguuggaagu

SEQ ID NO: 1723 - RNA, 17 nt, Artificial Sequence
  Synthetic
ggguuggaagugagggu

SEQ ID NO: 1724 - RNA, 17 nt, Artificial Sequence
  Synthetic
guuggaagugaggguca

SEQ ID NO: 1725 - RNA, 17 nt, Artificial Sequence
  Synthetic
uggaagugagggucaga

SEQ ID NO: 1726 - RNA, 17 nt, Artificial Sequence
  Synthetic
ggaagugagggucagag

SEQ ID NO: 1727 - RNA, 17 nt, Artificial Sequence
  Synthetic
gagggucagagaggagu

SEQ ID NO: 1728 - RNA, 17 nt, Artificial Sequence
  Synthetic
gggucagagaggaguca

SEQ ID NO: 1729 - RNA, 17 nt, Artificial Sequence
  Synthetic
gucagagaggagucaga

SEQ ID NO: 1730 - RNA, 17 nt, Artificial Sequence
  Synthetic
ccuagucuucaagcaga

SEQ ID NO: 1731 - RNA, 17 nt, Artificial Sequence
  Synthetic
cuagucuucaagcagau

SEQ ID NO: 1732 - RNA, 17 nt, Artificial Sequence
  Synthetic
agucuucaagcagauug

SEQ ID NO: 1733 - RNA, 17 nt, Artificial Sequence
  Synthetic
gcagauuggagaaaccc

SEQ ID NO: 1734 - RNA, 17 nt, Artificial Sequence
  Synthetic
ugaaaagacaucaagca

SEQ ID NO: 1735 - RNA, 17 nt, Artificial Sequence
  Synthetic
aaagacaucaagcacag

SEQ ID NO: 1736 - RNA, 17 nt, Artificial Sequence
  Synthetic
aagacaucaagcacaga

SEQ ID NO: 1737 - RNA, 17 nt, Artificial Sequence
  Synthetic
gacaucaagcacagaag

SEQ ID NO: 1738 - RNA, 17 nt, Artificial Sequence
  Synthetic
acaucaagcacagaagg

SEQ ID NO: 1739 - RNA, 17 nt, Artificial Sequence
  Synthetic
aucaagcacagaaggag

SEQ ID NO: 1740 - RNA, 17 nt, Artificial Sequence
  Synthetic
ucaagcacagaaggagg

SEQ ID NO: 1741 - RNA, 17 nt, Artificial Sequence
  Synthetic
aagcacagaaggaggag

SEQ ID NO: 1742 - RNA, 17 nt, Artificial Sequence
  Synthetic
agcacagaaggaggagg

SEQ ID NO: 1743 - RNA, 17 nt, Artificial Sequence
  Synthetic
aggaggagguuuagguc

SEQ ID NO: 1744 - RNA, 17 nt, Artificial Sequence
  Synthetic
aggagguuuaggucaag

SEQ ID NO: 1745 - RNA, 17 nt, Artificial Sequence
  Synthetic
uuuaggucaagaagaag

SEQ ID NO: 1746 - RNA, 17 nt, Artificial Sequence
  Synthetic
aagauggauugguguaa

SEQ ID NO: 1747 - RNA, 17 nt, Artificial Sequence
  Synthetic
uggauugguguaaaagg

SEQ ID NO: 1748 - RNA, 17 nt, Artificial Sequence
  Synthetic
aggaugggucugguuug

SEQ ID NO: 1749 - RNA, 17 nt, Artificial Sequence
  Synthetic
ggucugguuugcagagc

SEQ ID NO: 1750 - RNA, 17 nt, Artificial Sequence
  Synthetic
cuccaggcugucuuuca

SEQ ID NO: 1751 - RNA, 17 nt, Artificial Sequence
  Synthetic
uuuccuucccaucccag

SEQ ID NO: 1752 - RNA, 17 nt, Artificial Sequence
  Synthetic
ccaucccagcugaaaua

SEQ ID NO: 1753 - RNA, 17 nt, Artificial Sequence
  Synthetic
aucccagcugaaauacu

SEQ ID NO: 1754 - RNA, 17 nt, Artificial Sequence
  Synthetic
ucccagcugaaauacug

SEQ ID NO: 1755 - RNA, 17 nt, Artificial Sequence
  Synthetic
aaauacugaggggucuc

SEQ ID NO: 1756 - RNA, 17 nt, Artificial Sequence
  Synthetic
aauacugaggggucucc

SEQ ID NO: 1757 - RNA, 17 nt, Artificial Sequence
  Synthetic
uacugaggggucuccag

SEQ ID NO: 1758 - RNA, 17 nt, Artificial Sequence
  Synthetic
acugaggggucuccagg

SEQ ID NO: 1759 - RNA, 17 nt, Artificial Sequence
  Synthetic
aggaggagacuagauuu

SEQ ID NO: 1760 - RNA, 17 nt, Artificial Sequence
  Synthetic
acuagauuuaugaauac

SEQ ID NO: 1761 - RNA, 17 nt, Artificial Sequence
  Synthetic
uuaugaauacacgaggu

SEQ ID NO: 1762 - RNA, 17 nt, Artificial Sequence
  Synthetic
acacgagguaugagguc

SEQ ID NO: 1763 - RNA, 17 nt, Artificial Sequence
  Synthetic
cacgagguaugaggucu

SEQ ID NO: 1764 - RNA, 17 nt, Artificial Sequence
  Synthetic
cauacuucagcucacac

SEQ ID NO: 1765 - RNA, 17 nt, Artificial Sequence
  Synthetic
ucacacaugagaucuag

SEQ ID NO: 1766 - RNA, 17 nt, Artificial Sequence
  Synthetic
acacaugagaucuaggu

SEQ ID NO: 1767 - RNA, 17 nt, Artificial Sequence
  Synthetic
uaccuaguagucauuuc

SEQ ID NO: 1768 - RNA, 17 nt, Artificial Sequence
  Synthetic
agucauuucauggguug

SEQ ID NO: 1769 - RNA, 17 nt, Artificial Sequence
  Synthetic
gucauuucauggguugu

SEQ ID NO: 1770 - RNA, 17 nt, Artificial Sequence
  Synthetic
ucauuucauggguuguu

SEQ ID NO: 1771 - RNA, 17 nt, Artificial Sequence
  Synthetic
auuucauggguuguugg

SEQ ID NO: 1772 - RNA, 17 nt, Artificial Sequence
  Synthetic
guuguugggaggauucu

SEQ ID NO: 1773 - RNA, 17 nt, Artificial Sequence
  Synthetic
acucuuaguuacucauu

SEQ ID NO: 1774 - RNA, 17 nt, Artificial Sequence
  Synthetic
cucuuaguuacucauuc

SEQ ID NO: 1775 - RNA, 17 nt, Artificial Sequence
  Synthetic
cucauucagggauagca

SEQ ID NO: 1776 - RNA, 17 nt, Artificial Sequence
  Synthetic
uagcacugagcaaagca

SEQ ID NO: 1777 - RNA, 17 nt, Artificial Sequence
  Synthetic
gagcaaagcauugagca

SEQ ID NO: 1778 - RNA, 17 nt, Artificial Sequence
  Synthetic
agcaaagcauugagcaa

SEQ ID NO: 1779 - RNA, 17 nt, Artificial Sequence
  Synthetic
ugagcaaagggguccca

SEQ ID NO: 1780 - RNA, 17 nt, Artificial Sequence
  Synthetic
aaaggggucccauagag

SEQ ID NO: 1781 - RNA, 17 nt, Artificial Sequence
  Synthetic
aggggucccauagaggu

SEQ ID NO: 1782 - RNA, 17 nt, Artificial Sequence
  Synthetic
ggggucccauagaggug

SEQ ID NO: 1783 - RNA, 17 nt, Artificial Sequence
  Synthetic
gggucccauagagguga

SEQ ID NO: 1784 - RNA, 17 nt, Artificial Sequence
  Synthetic
auagaggugagggaagc

SEQ ID NO: 1785 - RNA, 17 nt, Artificial Sequence
  Synthetic
uuaaccgucaauaggca

SEQ ID NO: 1786 - RNA, 17 nt, Artificial Sequence
  Synthetic
uaaccgucaauaggcaa

SEQ ID NO: 1787 - RNA, 17 nt, Artificial Sequence
  Synthetic
aaccgucaauaggcaaa

SEQ ID NO: 1788 - RNA, 17 nt, Artificial Sequence
  Synthetic
accgucaauaggcaaag

SEQ ID NO: 1789 - RNA, 17 nt, Artificial Sequence
  Synthetic
ccgucaauaggcaaagg

SEQ ID NO: 1790 - RNA, 17 nt, Artificial Sequence
  Synthetic
cgucaauaggcaaaggg

SEQ ID NO: 1791 - RNA, 17 nt, Artificial Sequence
  Synthetic
caauaggcaaagggggg

SEQ ID NO: 1792 - RNA, 17 nt, Artificial Sequence
  Synthetic
aauaggcaaagggggga

SEQ ID NO: 1793 - RNA, 17 nt, Artificial Sequence
  Synthetic
ggaagggacauauucau

SEQ ID NO: 1794 - RNA, 17 nt, Artificial Sequence
  Synthetic
gaagggacauauucauu

SEQ ID NO: 1795 - RNA, 17 nt, Artificial Sequence
  Synthetic
uuuggaaauaagcugcc

SEQ ID NO: 1796 - RNA, 17 nt, Artificial Sequence
  Synthetic
agccuccguauuucaga

SEQ ID NO: 1797 - RNA, 17 nt, Artificial Sequence
  Synthetic
uccguauuucagacuga

SEQ ID NO: 1798 - RNA, 17 nt, Artificial Sequence
  Synthetic
ccguauuucagacugaa

SEQ ID NO: 1799 - RNA, 17 nt, Artificial Sequence
  Synthetic
cguauuucagacugaau

SEQ ID NO: 1800 - RNA, 17 nt, Artificial Sequence
  Synthetic
uuucagacugaaugggg

SEQ ID NO: 1801 - RNA, 17 nt, Artificial Sequence
  Synthetic
uucagacugaauggggg

SEQ ID NO: 1802 - RNA, 17 nt, Artificial Sequence
  Synthetic
ucagacugaaugggggu

SEQ ID NO: 1803 - RNA, 17 nt, Artificial Sequence
  Synthetic
cagacugaaugggggug

SEQ ID NO: 1804 - RNA, 17 nt, Artificial Sequence
  Synthetic
agacugaaugggggugg

SEQ ID NO: 1805 - RNA, 17 nt, Artificial Sequence
  Synthetic
gacugaauggggguggg

SEQ ID NO: 1806 - RNA, 17 nt, Artificial Sequence
  Synthetic
gccuucuccagacaaac

SEQ ID NO: 1807 - RNA, 17 nt, Artificial Sequence
  Synthetic
agacaaaccagaagcaa

SEQ ID NO: 1808 - RNA, 17 nt, Artificial Sequence
  Synthetic
aucgucucucccucccu

SEQ ID NO: 1809 - RNA, 17 nt, Artificial Sequence
  Synthetic
cucucccucccuuugaa

SEQ ID NO: 1810 - RNA, 17 nt, Artificial Sequence
  Synthetic
aauauaccccuuagugu

SEQ ID NO: 1811 - RNA, 17 nt, Artificial Sequence
  Synthetic
uggguauauucauuuca

SEQ ID NO: 1812 - RNA, 17 nt, Artificial Sequence
  Synthetic
ggguauauucauuucaa

SEQ ID NO: 1813 - RNA, 17 nt, Artificial Sequence
  Synthetic
gguauauucauuucaaa

SEQ ID NO: 1814 - RNA, 17 nt, Artificial Sequence
  Synthetic
uauauucauuucaaagg

SEQ ID NO: 1815 - RNA, 17 nt, Artificial Sequence
  Synthetic
uauucauuucaaaggga

SEQ ID NO: 1816 - RNA, 17 nt, Artificial Sequence
  Synthetic
uucauuucaaagggaga

SEQ ID NO: 1817 - RNA, 17 nt, Artificial Sequence
  Synthetic
cauuucaaagggagaga

SEQ ID NO: 1818 - RNA, 17 nt, Artificial Sequence
  Synthetic
uaugauugugcacauac

SEQ ID NO: 1819 - RNA, 17 nt, Artificial Sequence
  Synthetic
acauacuugagacuguu

SEQ ID NO: 1820 - RNA, 17 nt, Artificial Sequence
  Synthetic
uugagacuguuuugaau

SEQ ID NO: 1821 - RNA, 17 nt, Artificial Sequence
  Synthetic
ugagacuguuuugaauu

SEQ ID NO: 1822 - RNA, 17 nt, Artificial Sequence
  Synthetic
gagacuguuuugaauuu

SEQ ID NO: 1823 - RNA, 17 nt, Artificial Sequence
  Synthetic
agacuguuuugaauuug

SEQ ID NO: 1824 - RNA, 17 nt, Artificial Sequence
  Synthetic
aucauaguacagguaag

SEQ ID NO: 1825 - RNA, 17 nt, Artificial Sequence
  Synthetic
cauaguacagguaaggu

SEQ ID NO: 1826 - RNA, 17 nt, Artificial Sequence
  Synthetic
auaguacagguaaggug

SEQ ID NO: 1827 - RNA, 17 nt, Artificial Sequence
  Synthetic
uaguacagguaagguga

SEQ ID NO: 1828 - RNA, 17 nt, Artificial Sequence
  Synthetic
ugagggaauaguaagug

SEQ ID NO: 1829 - RNA, 17 nt, Artificial Sequence
  Synthetic
agggaauaguaaguggu

SEQ ID NO: 1830 - RNA, 17 nt, Artificial Sequence
  Synthetic
aaguggugagaacuacu

SEQ ID NO: 1831 - RNA, 17 nt, Artificial Sequence
  Synthetic
aguggugagaacuacuc

SEQ ID NO: 1832 - RNA, 17 nt, Artificial Sequence
  Synthetic
guggugagaacuacuca

SEQ ID NO: 1833 - RNA, 17 nt, Artificial Sequence
  Synthetic
ugagaacuacucaggga

SEQ ID NO: 1834 - RNA, 17 nt, Artificial Sequence
  Synthetic
ucagggaaugaaggugu

SEQ ID NO: 1835 - RNA, 17 nt, Artificial Sequence
  Synthetic
gaaggugucagaauaau

SEQ ID NO: 1836 - RNA, 17 nt, Artificial Sequence
  Synthetic
acugacuuucucagccu

SEQ ID NO: 1837 - RNA, 17 nt, Artificial Sequence
  Synthetic
uuucucagccucugaau

SEQ ID NO: 1838 - RNA, 17 nt, Artificial Sequence
  Synthetic
gccucugaauaugaacg

SEQ ID NO: 1839 - RNA, 17 nt, Artificial Sequence
  Synthetic
agcauuguggcugucag

SEQ ID NO: 1840 - RNA, 17 nt, Artificial Sequence
  Synthetic
gcauuguggcugucagc

SEQ ID NO: 1841 - RNA, 17 nt, Artificial Sequence
  Synthetic
gcugucagcaggaagca

SEQ ID NO: 1842 - RNA, 17 nt, Artificial Sequence
  Synthetic
gucagcaggaagcaacg

SEQ ID NO: 1843 - RNA, 17 nt, Artificial Sequence
  Synthetic
ucagcaggaagcaacga

SEQ ID NO: 1844 - RNA, 17 nt, Artificial Sequence
  Synthetic
cagcaggaagcaacgaa

SEQ ID NO: 1845 - RNA, 17 nt, Artificial Sequence
  Synthetic
ccuuuugcucuuaaguu

SEQ ID NO: 1846 - RNA, 17 nt, Artificial Sequence
  Synthetic
cuuuugcucuuaaguug

SEQ ID NO: 1847 - RNA, 17 nt, Artificial Sequence
  Synthetic
uuugcucuuaaguugug

SEQ ID NO: 1848 - RNA, 17 nt, Artificial Sequence
  Synthetic
agagugcaacaguagca

SEQ ID NO: 1849 - RNA, 17 nt, Artificial Sequence
  Synthetic
gcauaggacccuacccu

SEQ ID NO: 1850 - RNA, 17 nt, Artificial Sequence
  Synthetic
ugcauauucuuauguau

SEQ ID NO: 1851 - RNA, 17 nt, Artificial Sequence
  Synthetic
ugaaaguuacaaauugc

SEQ ID NO: 1852 - RNA, 17 nt, Artificial Sequence
  Synthetic
aguuacaaauugcuuga

SEQ ID NO: 1853 - RNA, 20 nt, Artificial Sequence
  Synthetic
uuuguaacuuucacauacau

SEQ ID NO: 1854 - RNA, 20 nt, Artificial Sequence
  Synthetic
auaugcaaauacuaagaugu

SEQ ID NO: 1855 - RNA, 20 nt, Artificial Sequence
  Synthetic
agaaugucuuugacuuggcc

SEQ ID NO: 1856 - RNA, 20 nt, Artificial Sequence
  Synthetic
aaugucuuugacuuggccca

SEQ ID NO: 1857 - RNA, 20 nt, Artificial Sequence
  Synthetic
cuuugacuuggcccagaggg

SEQ ID NO: 1858 - RNA, 20 nt, Artificial Sequence
  Synthetic
uguugcacucuccacaacuu

SEQ ID NO: 1859 - RNA, 20 nt, Artificial Sequence
  Synthetic
ucuccacaacuuaagagcaa

SEQ ID NO: 1860 - RNA, 20 nt, Artificial Sequence
  Synthetic
cuccacaacuuaagagcaaa

SEQ ID NO: 1861 - RNA, 20 nt, Artificial Sequence
  Synthetic
caaugcucaccguucauauu

SEQ ID NO: 1862 - RNA, 20 nt, Artificial Sequence
  Synthetic
ucaccguucauauucagagg

SEQ ID NO: 1863 - RNA, 20 nt, Artificial Sequence
  Synthetic
accguucauauucagaggcu

SEQ ID NO: 1864 - RNA, 20 nt, Artificial Sequence
  Synthetic
uauucugacaccuucauucc

SEQ ID NO: 1865 - RNA, 20 nt, Artificial Sequence
  Synthetic
ucaaguaugugcacaaucau

SEQ ID NO: 1866 - RNA, 20 nt, Artificial Sequence
  Synthetic
augugcacaaucauaugaga

SEQ ID NO: 1867 - RNA, 20 nt, Artificial Sequence
  Synthetic
cacaaucauaugagacagaa

SEQ ID NO: 1868 - RNA, 20 nt, Artificial Sequence
  Synthetic
aaaaaccucucucucucccu

SEQ ID NO: 1869 - RNA, 20 nt, Artificial Sequence
  Synthetic
ccucucucucucccuuugaa

SEQ ID NO: 1870 - RNA, 20 nt, Artificial Sequence
  Synthetic
aaugaauauacccaaacacu

SEQ ID NO: 1871 - RNA, 20 nt, Artificial Sequence
  Synthetic
augaauauacccaaacacua

SEQ ID NO: 1872 - RNA, 20 nt, Artificial Sequence
  Synthetic
uaagggguauauucauuuca

SEQ ID NO: 1873 - RNA, 20 nt, Artificial Sequence
  Synthetic
aagggguauauucauuucaa

SEQ ID NO: 1874 - RNA, 20 nt, Artificial Sequence
  Synthetic
agggguauauucauuucaaa

SEQ ID NO: 1875 - RNA, 20 nt, Artificial Sequence
  Synthetic
ggguauauucauuucaaagg

SEQ ID NO: 1876 - RNA, 20 nt, Artificial Sequence
  Synthetic
gguauauucauuucaaaggg

SEQ ID NO: 1877 - RNA, 20 nt, Artificial Sequence
  Synthetic
guauauucauuucaaaggga

SEQ ID NO: 1878 - RNA, 20 nt, Artificial Sequence
  Synthetic
auauucauuucaaagggagg

SEQ ID NO: 1879 - RNA, 20 nt, Artificial Sequence
  Synthetic
uucuguugcuucugguuugu

SEQ ID NO: 1880 - RNA, 20 nt, Artificial Sequence
  Synthetic
ucuguugcuucugguuuguc

SEQ ID NO: 1881 - RNA, 20 nt, Artificial Sequence
  Synthetic
uguugcuucugguuugucug

SEQ ID NO: 1882 - RNA, 20 nt, Artificial Sequence
  Synthetic
gguuugucuggagaaggcau

SEQ ID NO: 1883 - RNA, 20 nt, Artificial Sequence
  Synthetic
guuugucuggagaaggcauc

SEQ ID NO: 1884 - RNA, 20 nt, Artificial Sequence
  Synthetic
cccccccacccccauucagu

SEQ ID NO: 1885 - RNA, 20 nt, Artificial Sequence
  Synthetic
acccccauucagucugaaau

SEQ ID NO: 1886 - RNA, 20 nt, Artificial Sequence
  Synthetic
cccccauucagucugaaaua

SEQ ID NO: 1887 - RNA, 20 nt, Artificial Sequence
  Synthetic
ggcugguaaauuguacuuuu

SEQ ID NO: 1888 - RNA, 20 nt, Artificial Sequence
  Synthetic
ucaaggcagcuuauuuccaa

SEQ ID NO: 1889 - RNA, 20 nt, Artificial Sequence
  Synthetic
ugccuauugacgguuaaaug

SEQ ID NO: 1890 - RNA, 20 nt, Artificial Sequence
  Synthetic
gauaccuacacuugugugca

SEQ ID NO: 1891 - RNA, 20 nt, Artificial Sequence
  Synthetic
uucaggcuucccucaccucu

SEQ ID NO: 1892 - RNA, 20 nt, Artificial Sequence
  Synthetic
ucaggcuucccucaccucua

SEQ ID NO: 1893 - RNA, 20 nt, Artificial Sequence
  Synthetic
ugcuuugcucagugcuaucc

SEQ ID NO: 1894 - RNA, 20 nt, Artificial Sequence
  Synthetic
uugcucagugcuaucccuga

SEQ ID NO: 1895 - RNA, 20 nt, Artificial Sequence
  Synthetic
cuaucccugaaugaguaacu

SEQ ID NO: 1896 - RNA, 20 nt, Artificial Sequence
  Synthetic
aacuaagaguuugaugcuua

SEQ ID NO: 1897 - RNA, 20 nt, Artificial Sequence
  Synthetic
ugcugccugugguugccuca

SEQ ID NO: 1898 - RNA, 20 nt, Artificial Sequence
  Synthetic
uagaauccucccaacaaccc

SEQ ID NO: 1899 - RNA, 20 nt, Artificial Sequence
  Synthetic
uccucaccuagaucucaugu

SEQ ID NO: 1900 - RNA, 20 nt, Artificial Sequence
  Synthetic
accuagaucucaugugugag

SEQ ID NO: 1901 - RNA, 20 nt, Artificial Sequence
  Synthetic
uucauaaaucuagucuccuc

SEQ ID NO: 1902 - RNA, 20 nt, Artificial Sequence
  Synthetic
ucauaaaucuagucuccucc

SEQ ID NO: 1903 - RNA, 20 nt, Artificial Sequence
  Synthetic
gagaccccucaguauuucag

SEQ ID NO: 1904 - RNA, 20 nt, Artificial Sequence
  Synthetic
agaccccucaguauuucagc

SEQ ID NO: 1905 - RNA, 20 nt, Artificial Sequence
  Synthetic
cccucaguauuucagcuggg

SEQ ID NO: 1906 - RNA, 20 nt, Artificial Sequence
  Synthetic
ccucaguauuucagcuggga

SEQ ID NO: 1907 - RNA, 20 nt, Artificial Sequence
  Synthetic
cucaguauuucagcugggau

SEQ ID NO: 1908 - RNA, 20 nt, Artificial Sequence
  Synthetic
aguauuucagcugggauggg

SEQ ID NO: 1909 - RNA, 20 nt, Artificial Sequence
  Synthetic
guauuucagcugggauggga

SEQ ID NO: 1910 - RNA, 20 nt, Artificial Sequence
  Synthetic
cugggaugggaaggaaaucu

SEQ ID NO: 1911 - RNA, 20 nt, Artificial Sequence
  Synthetic
gggaaggaaaucuaugaagu

SEQ ID NO: 1912 - RNA, 20 nt, Artificial Sequence
  Synthetic
uaugaagucagaagcauuca

SEQ ID NO: 1913 - RNA, 20 nt, Artificial Sequence
  Synthetic
agcauucagugaaagacagc

SEQ ID NO: 1914 - RNA, 20 nt, Artificial Sequence
  Synthetic
gcauucagugaaagacagcc

SEQ ID NO: 1915 - RNA, 20 nt, Artificial Sequence
  Synthetic
agugaaagacagccuggagu

SEQ ID NO: 1916 - RNA, 20 nt, Artificial Sequence
  Synthetic
aaagacagccuggagucugg

SEQ ID NO: 1917 - RNA, 20 nt, Artificial Sequence
  Synthetic
ucugugcuugaugucuuuuc

SEQ ID NO: 1918 - RNA, 20 nt, Artificial Sequence
  Synthetic
caaggguuucuccaaucugc

SEQ ID NO: 1919 - RNA, 20 nt, Artificial Sequence
  Synthetic
ucuccaaucugcuugaagac

SEQ ID NO: 1920 - RNA, 20 nt, Artificial Sequence
  Synthetic
cuccaaucugcuugaagacu

SEQ ID NO: 1921 - RNA, 20 nt, Artificial Sequence
  Synthetic
ucugcauccucauaugcugc

SEQ ID NO: 1922 - RNA, 20 nt, Artificial Sequence
  Synthetic
ccucccuccuucccauccuu

SEQ ID NO: 1923 - RNA, 20 nt, Artificial Sequence
  Synthetic
cuccuucccauccucacgcc

SEQ ID NO: 1924 - RNA, 20 nt, Artificial Sequence
  Synthetic
uccucacgccuugagcuuag

SEQ ID NO: 1925 - RNA, 20 nt, Artificial Sequence
  Synthetic
gaggccauccucacccugac

SEQ ID NO: 1926 - RNA, 20 nt, Artificial Sequence
  Synthetic
ggccauccucacccugaccu

SEQ ID NO: 1927 - RNA, 20 nt, Artificial Sequence
  Synthetic
uccugacccuccuuuggcca

SEQ ID NO: 1928 - RNA, 20 nt, Artificial Sequence
  Synthetic
aaaccuucugcaacaccaac

SEQ ID NO: 1929 - RNA, 20 nt, Artificial Sequence
  Synthetic
cugcucagcucaugacuuag

SEQ ID NO: 1930 - RNA, 20 nt, Artificial Sequence
  Synthetic
ugcucagcucaugacuuaga

SEQ ID NO: 1931 - RNA, 20 nt, Artificial Sequence
  Synthetic
uugcccaugcagugcuugca

SEQ ID NO: 1932 - RNA, 20 nt, Artificial Sequence
  Synthetic
acucaaauuccuucucauuu

SEQ ID NO: 1933 - RNA, 20 nt, Artificial Sequence
  Synthetic
ucucgccugguucuaaguca

SEQ ID NO: 1934 - RNA, 20 nt, Artificial Sequence
  Synthetic
ugaaacuuauuaaccauacc

SEQ ID NO: 1935 - RNA, 20 nt, Artificial Sequence
  Synthetic
gaaacuuauuaaccauaccu

SEQ ID NO: 1936 - RNA, 20 nt, Artificial Sequence
  Synthetic
aacuuauuaaccauaccuug

SEQ ID NO: 1937 - RNA, 20 nt, Artificial Sequence
  Synthetic
acuuauuaaccauaccuugg

SEQ ID NO: 1938 - RNA, 20 nt, Artificial Sequence
  Synthetic
cuuauuaaccauaccuugga

SEQ ID NO: 1939 - RNA, 20 nt, Artificial Sequence
  Synthetic
uuauuaaccauaccuuggag

SEQ ID NO: 1940 - RNA, 20 nt, Artificial Sequence
  Synthetic
ccuuggaggggaaaucacac

SEQ ID NO: 1941 - RNA, 20 nt, Artificial Sequence
  Synthetic
agguaaaaaguuguacauuu

SEQ ID NO: 1942 - RNA, 20 nt, Artificial Sequence
  Synthetic
cuguucagaucacuaaacuc

SEQ ID NO: 1943 - RNA, 20 nt, Artificial Sequence
  Synthetic
acucaagaaucagcaauucu

SEQ ID NO: 1944 - RNA, 20 nt, Artificial Sequence
  Synthetic
gcuuucuuuuaaauauacau

SEQ ID NO: 1945 - RNA, 20 nt, Artificial Sequence
  Synthetic
cuuucuuuuaaauauacaua

SEQ ID NO: 1946 - RNA, 20 nt, Artificial Sequence
  Synthetic
uaaauauacauaaggaacuu

SEQ ID NO: 1947 - RNA, 20 nt, Artificial Sequence
  Synthetic
aaauauacauaaggaacuuu

SEQ ID NO: 1948 - RNA, 20 nt, Artificial Sequence
  Synthetic
auacauaaggaacuuucgga

SEQ ID NO: 1949 - RNA, 20 nt, Artificial Sequence
  Synthetic
cauaaggaacuuucggagug

SEQ ID NO: 1950 - RNA, 20 nt, Artificial Sequence
  Synthetic
auaaggaacuuucggaguga

SEQ ID NO: 1951 - RNA, 20 nt, Artificial Sequence
  Synthetic
uaaggaacuuucggagugaa

SEQ ID NO: 1952 - RNA, 20 nt, Artificial Sequence
  Synthetic
aggaacuuucggagugaagg

SEQ ID NO: 1953 - RNA, 20 nt, Artificial Sequence
  Synthetic
uugucaauaacuugaugcau

SEQ ID NO: 1954 - RNA, 20 nt, Artificial Sequence
  Synthetic
ucaauaacuugaugcaugug

SEQ ID NO: 1955 - RNA, 20 nt, Artificial Sequence
  Synthetic
caauaacuugaugcauguga

SEQ ID NO: 1956 - RNA, 20 nt, Artificial Sequence
  Synthetic
aauaacuugaugcaugugaa

SEQ ID NO: 1957 - RNA, 20 nt, Artificial Sequence
  Synthetic
auaacuugaugcaugugaag

SEQ ID NO: 1958 - RNA, 20 nt, Artificial Sequence
  Synthetic
gauuuggcuuucuauaauug

SEQ ID NO: 1959 - RNA, 20 nt, Artificial Sequence
  Synthetic
uuuaaacagaugccaaauaa

SEQ ID NO: 1960 - RNA, 20 nt, Artificial Sequence
  Synthetic
aacagaugccaaauaaaugg

SEQ ID NO: 1961 - RNA, 20 nt, Artificial Sequence
  Synthetic
acccccagcccaggcugugu

SEQ ID NO: 1962 - RNA, 20 nt, Artificial Sequence
  Synthetic
agccaugugcacaacucuga

SEQ ID NO: 1963 - RNA, 20 nt, Artificial Sequence
  Synthetic
ugacugggucaccagcccac

SEQ ID NO: 1964 - RNA, 20 nt, Artificial Sequence
  Synthetic
cagauauuuccugcucccca

SEQ ID NO: 1965 - RNA, 20 nt, Artificial Sequence
  Synthetic
auuuccugcuccccagugga

SEQ ID NO: 1966 - RNA, 20 nt, Artificial Sequence
  Synthetic
cccaguggaucggguguaaa

SEQ ID NO: 1967 - RNA, 20 nt, Artificial Sequence
  Synthetic
uguaaacugagcuugcucgc

SEQ ID NO: 1968 - RNA, 20 nt, Artificial Sequence
  Synthetic
guaaacugagcuugcucgcu

SEQ ID NO: 1969 - RNA, 20 nt, Artificial Sequence
  Synthetic
uaaacugagcuugcucgcuc

SEQ ID NO: 1970 - RNA, 20 nt, Artificial Sequence
  Synthetic
gcucgcucgggagccucuug

SEQ ID NO: 1971 - RNA, 20 nt, Artificial Sequence
  Synthetic
cucgcucgggagccucuugc

SEQ ID NO: 1972 - RNA, 20 nt, Artificial Sequence
  Synthetic
gggagccucuugcuggaaaa

SEQ ID NO: 1973 - RNA, 20 nt, Artificial Sequence
  Synthetic
ggaaaauagaacagcauuug

SEQ ID NO: 1974 - RNA, 20 nt, Artificial Sequence
  Synthetic
aagcguuuggcaaugugcuu

SEQ ID NO: 1975 - RNA, 20 nt, Artificial Sequence
  Synthetic
agcguuuggcaaugugcuuu

SEQ ID NO: 1976 - RNA, 20 nt, Artificial Sequence
  Synthetic
guuuggcaaugugcuuuugg

SEQ ID NO: 1977 - RNA, 20 nt, Artificial Sequence
  Synthetic
ugugcuuuuggaagaagacu

SEQ ID NO: 1978 - RNA, 20 nt, Artificial Sequence
  Synthetic
agaagacuaagagguaguuu

SEQ ID NO: 1979 - RNA, 20 nt, Artificial Sequence
  Synthetic
ccccgacaaaggcauagaug

SEQ ID NO: 1980 - RNA, 20 nt, Artificial Sequence
  Synthetic
cccgacaaaggcauagauga

SEQ ID NO: 1981 - RNA, 20 nt, Artificial Sequence
  Synthetic
augcagcagugcgucauccc

SEQ ID NO: 1982 - RNA, 20 nt, Artificial Sequence
  Synthetic
cauagcuugguccaaccugu

SEQ ID NO: 1983 - RNA, 20 nt, Artificial Sequence
  Synthetic
uacugcaauuauucaggcca

SEQ ID NO: 1984 - RNA, 20 nt, Artificial Sequence
  Synthetic
uuauucaggccaaagaauuc

SEQ ID NO: 1985 - RNA, 20 nt, Artificial Sequence
  Synthetic
uauucaggccaaagaauucc

SEQ ID NO: 1986 - RNA, 20 nt, Artificial Sequence
  Synthetic
aagaauuccuggaagguguu

SEQ ID NO: 1987 - RNA, 20 nt, Artificial Sequence
  Synthetic
agaauuccuggaagguguuc

SEQ ID NO: 1988 - RNA, 20 nt, Artificial Sequence
  Synthetic
aauuccuggaagguguucag

SEQ ID NO: 1989 - RNA, 20 nt, Artificial Sequence
  Synthetic
uccuggaagguguucaggag

SEQ ID NO: 1990 - RNA, 20 nt, Artificial Sequence
  Synthetic
ucaggagaaggacaauguug

SEQ ID NO: 1991 - RNA, 20 nt, Artificial Sequence
  Synthetic
caggagaaggacaauguugu

SEQ ID NO: 1992 - RNA, 20 nt, Artificial Sequence
  Synthetic
aggagaaggacaauguugua

SEQ ID NO: 1993 - RNA, 20 nt, Artificial Sequence
  Synthetic
ggacaauguuguagggagcc

SEQ ID NO: 1994 - RNA, 20 nt, Artificial Sequence
  Synthetic
caauguuguagggagcccag

SEQ ID NO: 1995 - RNA, 20 nt, Artificial Sequence
  Synthetic
auguuguagggagcccagaa

SEQ ID NO: 1996 - RNA, 20 nt, Artificial Sequence
  Synthetic
gaaaauaaacaaucaugaug

SEQ ID NO: 1997 - RNA, 20 nt, Artificial Sequence
  Synthetic
cucuucuucucauuucgaca

SEQ ID NO: 1998 - RNA, 20 nt, Artificial Sequence
  Synthetic
uucucauuucgacaccgaag

SEQ ID NO: 1999 - RNA, 20 nt, Artificial Sequence
  Synthetic
cgacaccgaagcagaguuuu

SEQ ID NO: 2000 - RNA, 20 nt, Artificial Sequence
  Synthetic
aagcagaguuuuuaggauuc

SEQ ID NO: 2001 - RNA, 20 nt, Artificial Sequence
  Synthetic
augaccaugacaagcagcgg

SEQ ID NO: 2002 - RNA, 20 nt, Artificial Sequence
  Synthetic
aagaugacuaucuuuaaugu

SEQ ID NO: 2003 - RNA, 20 nt, Artificial Sequence
  Synthetic
agaugacuaucuuuaauguc

SEQ ID NO: 2004 - RNA, 20 nt, Artificial Sequence
  Synthetic
uuaaugucuggaaauucuuc

SEQ ID NO: 2005 - RNA, 20 nt, Artificial Sequence
  Synthetic
ccagaauugauacugacugu

SEQ ID NO: 2006 - RNA, 20 nt, Artificial Sequence
  Synthetic
cagaauugauacugacugua

SEQ ID NO: 2007 - RNA, 20 nt, Artificial Sequence
  Synthetic
ugauacugacuguauggaaa

SEQ ID NO: 2008 - RNA, 20 nt, Artificial Sequence
  Synthetic
auacugacuguauggaaaau

SEQ ID NO: 2009 - RNA, 20 nt, Artificial Sequence
  Synthetic
aaaugagagcugcaggugua

SEQ ID NO: 2010 - RNA, 20 nt, Artificial Sequence
  Synthetic
guguaaugaagaccuucuuu

SEQ ID NO: 2011 - RNA, 17 nt, Artificial Sequence
  Synthetic
guaacuuucacauacau

SEQ ID NO: 2012 - RNA, 17 nt, Artificial Sequence
  Synthetic
ugcaaauacuaagaugu

SEQ ID NO: 2013 - RNA, 17 nt, Artificial Sequence
  Synthetic
augucuuugacuuggcc

SEQ ID NO: 2014 - RNA, 17 nt, Artificial Sequence
  Synthetic
gucuuugacuuggccca

SEQ ID NO: 2015 - RNA, 17 nt, Artificial Sequence
  Synthetic
ugacuuggcccagaggg

SEQ ID NO: 2016 - RNA, 17 nt, Artificial Sequence
  Synthetic
ugcacucuccacaacuu

SEQ ID NO: 2017 - RNA, 17 nt, Artificial Sequence
  Synthetic
ccacaacuuaagagcaa

SEQ ID NO: 2018 - RNA, 17 nt, Artificial Sequence
  Synthetic
cacaacuuaagagcaaa

SEQ ID NO: 2019 - RNA, 17 nt, Artificial Sequence
  Synthetic
ugcucaccguucauauu

SEQ ID NO: 2020 - RNA, 17 nt, Artificial Sequence
  Synthetic
ccguucauauucagagg

SEQ ID NO: 2021 - RNA, 17 nt, Artificial Sequence
  Synthetic
guucauauucagaggcu

SEQ ID NO: 2022 - RNA, 17 nt, Artificial Sequence
  Synthetic
ucugacaccuucauucc

SEQ ID NO: 2023 - RNA, 17 nt, Artificial Sequence
  Synthetic
aguaugugcacaaucau

SEQ ID NO: 2024 - RNA, 17 nt, Artificial Sequence
  Synthetic
ugcacaaucauaugaga

SEQ ID NO: 2025 - RNA, 17 nt, Artificial Sequence
  Synthetic
aaucauaugagacagaa

SEQ ID NO: 2026 - RNA, 17 nt, Artificial Sequence
  Synthetic
aaccucucucucucccu

SEQ ID NO: 2027 - RNA, 17 nt, Artificial Sequence
  Synthetic
cucucucucccuuugaa

SEQ ID NO: 2028 - RNA, 17 nt, Artificial Sequence
  Synthetic
gaauauacccaaacacu

SEQ ID NO: 2029 - RNA, 17 nt, Artificial Sequence
  Synthetic
aauauacccaaacacua

SEQ ID NO: 2030 - RNA, 17 nt, Artificial Sequence
  Synthetic
gggguauauucauuuca

SEQ ID NO: 2031 - RNA, 17 nt, Artificial Sequence
  Synthetic
ggguauauucauuucaa

SEQ ID NO: 2032 - RNA, 17 nt, Artificial Sequence
  Synthetic
gguauauucauuucaaa

SEQ ID NO: 2033 - RNA, 17 nt, Artificial Sequence
  Synthetic
uauauucauuucaaagg

SEQ ID NO: 2034 - RNA, 17 nt, Artificial Sequence
  Synthetic
auauucauuucaaaggg

SEQ ID NO: 2035 - RNA, 17 nt, Artificial Sequence
  Synthetic
uauucauuucaaaggga

SEQ ID NO: 2036 - RNA, 17 nt, Artificial Sequence
  Synthetic
uucauuucaaagggagg

SEQ ID NO: 2037 - RNA, 17 nt, Artificial Sequence
  Synthetic
uguugcuucugguuugu

SEQ ID NO: 2038 - RNA, 17 nt, Artificial Sequence
  Synthetic
guugcuucugguuuguc

SEQ ID NO: 2039 - RNA, 17 nt, Artificial Sequence
  Synthetic
ugcuucugguuugucug

SEQ ID NO: 2040 - RNA, 17 nt, Artificial Sequence
  Synthetic
uugucuggagaaggcau

SEQ ID NO: 2041 - RNA, 17 nt, Artificial Sequence
  Synthetic
ugucuggagaaggcauc

SEQ ID NO: 2042 - RNA, 17 nt, Artificial Sequence
  Synthetic
ccccacccccauucagu

SEQ ID NO: 2043 - RNA, 17 nt, Artificial Sequence
  Synthetic
cccauucagucugaaau

SEQ ID NO: 2044 - RNA, 17 nt, Artificial Sequence
  Synthetic
ccauucagucugaaaua

SEQ ID NO: 2045 - RNA, 17 nt, Artificial Sequence
  Synthetic
ugguaaauuguacuuuu

SEQ ID NO: 2046 - RNA, 17 nt, Artificial Sequence
  Synthetic
aggcagcuuauuuccaa

SEQ ID NO: 2047 - RNA, 17 nt, Artificial Sequence
  Synthetic
cuauugacgguuaaaug

SEQ ID NO: 2048 - RNA, 17 nt, Artificial Sequence
  Synthetic
accuacacuugugugca

SEQ ID NO: 2049 - RNA, 17 nt, Artificial Sequence
  Synthetic
aggcuucccucaccucu

SEQ ID NO: 2050 - RNA, 17 nt, Artificial Sequence
  Synthetic
ggcuucccucaccucua

SEQ ID NO: 2051 - RNA, 17 nt, Artificial Sequence
  Synthetic
uuugcucagugcuaucc

SEQ ID NO: 2052 - RNA, 17 nt, Artificial Sequence
  Synthetic
cucagugcuaucccuga

SEQ ID NO: 2053 - RNA, 17 nt, Artificial Sequence
  Synthetic
ucccugaaugaguaacu

SEQ ID NO: 2054 - RNA, 17 nt, Artificial Sequence
  Synthetic
uaagaguuugaugcuua

SEQ ID NO: 2055 - RNA, 17 nt, Artificial Sequence
  Synthetic
ugccugugguugccuca

SEQ ID NO: 2056 - RNA, 17 nt, Artificial Sequence
  Synthetic
aauccucccaacaaccc

SEQ ID NO: 2057 - RNA, 17 nt, Artificial Sequence
  Synthetic
ucaccuagaucucaugu

SEQ ID NO: 2058 - RNA, 17 nt, Artificial Sequence
  Synthetic
uagaucucaugugugag

SEQ ID NO: 2059 - RNA, 17 nt, Artificial Sequence
  Synthetic
auaaaucuagucuccuc

SEQ ID NO: 2060 - RNA, 17 nt, Artificial Sequence
  Synthetic
uaaaucuagucuccucc

SEQ ID NO: 2061 - RNA, 17 nt, Artificial Sequence
  Synthetic
accccucaguauuucag

SEQ ID NO: 2062 - RNA, 17 nt, Artificial Sequence
  Synthetic
ccccucaguauuucagc

SEQ ID NO: 2063 - RNA, 17 nt, Artificial Sequence
  Synthetic
ucaguauuucagcuggg

SEQ ID NO: 2064 - RNA, 17 nt, Artificial Sequence
  Synthetic
caguauuucagcuggga

SEQ ID NO: 2065 - RNA, 17 nt, Artificial Sequence
  Synthetic
aguauuucagcugggau

SEQ ID NO: 2066 - RNA, 17 nt, Artificial Sequence
  Synthetic
auuucagcugggauggg

SEQ ID NO: 2067 - RNA, 17 nt, Artificial Sequence
  Synthetic
uuucagcugggauggga

SEQ ID NO: 2068 - RNA, 17 nt, Artificial Sequence
  Synthetic
ggaugggaaggaaaucu

SEQ ID NO: 2069 - RNA, 17 nt, Artificial Sequence
  Synthetic
aaggaaaucuaugaagu

SEQ ID NO: 2070 - RNA, 17 nt, Artificial Sequence
  Synthetic
gaagucagaagcauuca

SEQ ID NO: 2071 - RNA, 17 nt, Artificial Sequence
  Synthetic
auucagugaaagacagc

SEQ ID NO: 2072 - RNA, 17 nt, Artificial Sequence
  Synthetic
uucagugaaagacagcc

SEQ ID NO: 2073 - RNA, 17 nt, Artificial Sequence
  Synthetic
gaaagacagccuggagu

SEQ ID NO: 2074 - RNA, 17 nt, Artificial Sequence
  Synthetic
gacagccuggagucugg

SEQ ID NO: 2075 - RNA, 17 nt, Artificial Sequence
  Synthetic
gugcuugaugucuuuuc

SEQ ID NO: 2076 - RNA, 17 nt, Artificial Sequence
  Synthetic
ggguuucuccaaucugc

SEQ ID NO: 2077 - RNA, 17 nt, Artificial Sequence
  Synthetic
ccaaucugcuugaagac

SEQ ID NO: 2078 - RNA, 17 nt, Artificial Sequence
  Synthetic
caaucugcuugaagacu

SEQ ID NO: 2079 - RNA, 17 nt, Artificial Sequence
  Synthetic
gcauccucauaugcugc

SEQ ID NO: 2080 - RNA, 17 nt, Artificial Sequence
  Synthetic
cccuccuucccauccuu

SEQ ID NO: 2081 - RNA, 17 nt, Artificial Sequence
  Synthetic
cuucccauccucacgcc

SEQ ID NO: 2082 - RNA, 17 nt, Artificial Sequence
  Synthetic
ucacgccuugagcuuag

SEQ ID NO: 2083 - RNA, 17 nt, Artificial Sequence
  Synthetic
gccauccucacccugac

SEQ ID NO: 2084 - RNA, 17 nt, Artificial Sequence
  Synthetic
cauccucacccugaccu

SEQ ID NO: 2085 - RNA, 17 nt, Artificial Sequence
  Synthetic
ugacccuccuuuggcca

SEQ ID NO: 2086 - RNA, 17 nt, Artificial Sequence
  Synthetic
ccuucugcaacaccaac

SEQ ID NO: 2087 - RNA, 17 nt, Artificial Sequence
  Synthetic
cucagcucaugacuuag

SEQ ID NO: 2088 - RNA, 17 nt, Artificial Sequence
  Synthetic
ucagcucaugacuuaga

SEQ ID NO: 2089 - RNA, 17 nt, Artificial Sequence
  Synthetic
cccaugcagugcuugca

SEQ ID NO: 2090 - RNA, 17 nt, Artificial Sequence
  Synthetic
caaauuccuucucauuu

SEQ ID NO: 2091 - RNA, 17 nt, Artificial Sequence
  Synthetic
cgccugguucuaaguca

SEQ ID NO: 2092 - RNA, 17 nt, Artificial Sequence
  Synthetic
aacuuauuaaccauacc

SEQ ID NO: 2093 - RNA, 17 nt, Artificial Sequence
  Synthetic
acuuauuaaccauaccu

SEQ ID NO: 2094 - RNA, 17 nt, Artificial Sequence
  Synthetic
uuauuaaccauaccuug

SEQ ID NO: 2095 - RNA, 17 nt, Artificial Sequence
  Synthetic
uauuaaccauaccuugg

SEQ ID NO: 2096 - RNA, 17 nt, Artificial Sequence
  Synthetic
auuaaccauaccuugga

SEQ ID NO: 2097 - RNA, 17 nt, Artificial Sequence
  Synthetic
uuaaccauaccuuggag

SEQ ID NO: 2098 - RNA, 17 nt, Artificial Sequence
  Synthetic
uggaggggaaaucacac

SEQ ID NO: 2099 - RNA, 17 nt, Artificial Sequence
  Synthetic
uaaaaaguuguacauuu

SEQ ID NO: 2100 - RNA, 17 nt, Artificial Sequence
  Synthetic
uucagaucacuaaacuc

SEQ ID NO: 2101 - RNA, 17 nt, Artificial Sequence
  Synthetic
caagaaucagcaauucu

SEQ ID NO: 2102 - RNA, 17 nt, Artificial Sequence
  Synthetic
uucuuuuaaauauacau

SEQ ID NO: 2103 - RNA, 17 nt, Artificial Sequence
  Synthetic
ucuuuuaaauauacaua

SEQ ID NO: 2104 - RNA, 17 nt, Artificial Sequence
  Synthetic
auauacauaaggaacuu

SEQ ID NO: 2105 - RNA, 17 nt, Artificial Sequence
  Synthetic
uauacauaaggaacuuu

SEQ ID NO: 2106 - RNA, 17 nt, Artificial Sequence
  Synthetic
cauaaggaacuuucgga

SEQ ID NO: 2107 - RNA, 17 nt, Artificial Sequence
  Synthetic
aaggaacuuucggagug

SEQ ID NO: 2108 - RNA, 17 nt, Artificial Sequence
  Synthetic
aggaacuuucggaguga

SEQ ID NO: 2109 - RNA, 17 nt, Artificial Sequence
  Synthetic
ggaacuuucggagugaa

SEQ ID NO: 2110 - RNA, 17 nt, Artificial Sequence
  Synthetic
aacuuucggagugaagg

SEQ ID NO: 2111 - RNA, 17 nt, Artificial Sequence
  Synthetic
ucaauaacuugaugcau

SEQ ID NO: 2112 - RNA, 17 nt, Artificial Sequence
  Synthetic
auaacuugaugcaugug

SEQ ID NO: 2113 - RNA, 17 nt, Artificial Sequence
  Synthetic
uaacuugaugcauguga

SEQ ID NO: 2114 - RNA, 17 nt, Artificial Sequence
  Synthetic
aacuugaugcaugugaa

SEQ ID NO: 2115 - RNA, 17 nt, Artificial Sequence
  Synthetic
acuugaugcaugugaag

SEQ ID NO: 2116 - RNA, 17 nt, Artificial Sequence
  Synthetic
uuggcuuucuauaauug

SEQ ID NO: 2117 - RNA, 17 nt, Artificial Sequence
  Synthetic
aaacagaugccaaauaa

SEQ ID NO: 2118 - RNA, 17 nt, Artificial Sequence
  Synthetic
agaugccaaauaaaugg

SEQ ID NO: 2119 - RNA, 17 nt, Artificial Sequence
  Synthetic
cccagcccaggcugugu

SEQ ID NO: 2120 - RNA, 17 nt, Artificial Sequence
  Synthetic
caugugcacaacucuga

SEQ ID NO: 2121 - RNA, 17 nt, Artificial Sequence
  Synthetic
cugggucaccagcccac

SEQ ID NO: 2122 - RNA, 17 nt, Artificial Sequence
  Synthetic
auauuuccugcucccca

SEQ ID NO: 2123 - RNA, 17 nt, Artificial Sequence
  Synthetic
uccugcuccccagugga

SEQ ID NO: 2124 - RNA, 17 nt, Artificial Sequence
  Synthetic
aguggaucggguguaaa

SEQ ID NO: 2125 - RNA, 17 nt, Artificial Sequence
  Synthetic
aaacugagcuugcucgc

SEQ ID NO: 2126 - RNA, 17 nt, Artificial Sequence
  Synthetic
aacugagcuugcucgcu

SEQ ID NO: 2127 - RNA, 17 nt, Artificial Sequence
  Synthetic
acugagcuugcucgcuc

SEQ ID NO: 2128 - RNA, 17 nt, Artificial Sequence
  Synthetic
cgcucgggagccucuug

SEQ ID NO: 2129 - RNA, 17 nt, Artificial Sequence
  Synthetic
gcucgggagccucuugc

SEQ ID NO: 2130 - RNA, 17 nt, Artificial Sequence
  Synthetic
agccucuugcuggaaaa

SEQ ID NO: 2131 - RNA, 17 nt, Artificial Sequence
  Synthetic
aaauagaacagcauuug

SEQ ID NO: 2132 - RNA, 17 nt, Artificial Sequence
  Synthetic
cguuuggcaaugugcuu

SEQ ID NO: 2133 - RNA, 17 nt, Artificial Sequence
  Synthetic
guuuggcaaugugcuuu

SEQ ID NO: 2134 - RNA, 17 nt, Artificial Sequence
  Synthetic
uggcaaugugcuuuugg

SEQ ID NO: 2135 - RNA, 17 nt, Artificial Sequence
  Synthetic
gcuuuuggaagaagacu

SEQ ID NO: 2136 - RNA, 17 nt, Artificial Sequence
  Synthetic
agacuaagagguaguuu

SEQ ID NO: 2137 - RNA, 17 nt, Artificial Sequence
  Synthetic
cgacaaaggcauagaug

SEQ ID NO: 2138 - RNA, 17 nt, Artificial Sequence
  Synthetic
gacaaaggcauagauga

SEQ ID NO: 2139 - RNA, 17 nt, Artificial Sequence
  Synthetic
cagcagugcgucauccc

SEQ ID NO: 2140 - RNA, 17 nt, Artificial Sequence
  Synthetic
agcuugguccaaccugu

SEQ ID NO: 2141 - RNA, 17 nt, Artificial Sequence
  Synthetic
ugcaauuauucaggcca

SEQ ID NO: 2142 - RNA, 17 nt, Artificial Sequence
  Synthetic
uucaggccaaagaauuc

SEQ ID NO: 2143 - RNA, 17 nt, Artificial Sequence
  Synthetic
ucaggccaaagaauucc

SEQ ID NO: 2144 - RNA, 17 nt, Artificial Sequence
  Synthetic
aauuccuggaagguguu

SEQ ID NO: 2145 - RNA, 17 nt, Artificial Sequence
  Synthetic
auuccuggaagguguuc

SEQ ID NO: 2146 - RNA, 17 nt, Artificial Sequence
  Synthetic
uccuggaagguguucag

SEQ ID NO: 2147 - RNA, 17 nt, Artificial Sequence
  Synthetic
uggaagguguucaggag

SEQ ID NO: 2148 - RNA, 17 nt, Artificial Sequence
  Synthetic
ggagaaggacaauguug

SEQ ID NO: 2149 - RNA, 17 nt, Artificial Sequence
  Synthetic
gagaaggacaauguugu

SEQ ID NO: 2150 - RNA, 17 nt, Artificial Sequence
  Synthetic
agaaggacaauguugua

SEQ ID NO: 2151 - RNA, 17 nt, Artificial Sequence
  Synthetic
caauguuguagggagcc

SEQ ID NO: 2152 - RNA, 17 nt, Artificial Sequence
  Synthetic
uguuguagggagcccag

SEQ ID NO: 2153 - RNA, 17 nt, Artificial Sequence
  Synthetic
uuguagggagcccagaa

SEQ ID NO: 2154 - RNA, 17 nt, Artificial Sequence
  Synthetic
aauaaacaaucaugaug

SEQ ID NO: 2155 - RNA, 17 nt, Artificial Sequence
  Synthetic
uucuucucauuucgaca

SEQ ID NO: 2156 - RNA, 17 nt, Artificial Sequence
  Synthetic
ucauuucgacaccgaag

SEQ ID NO: 2157 - RNA, 17 nt, Artificial Sequence
  Synthetic
caccgaagcagaguuuu

SEQ ID NO: 2158 - RNA, 17 nt, Artificial Sequence
  Synthetic
cagaguuuuuaggauuc

SEQ ID NO: 2159 - RNA, 17 nt, Artificial Sequence
  Synthetic
accaugacaagcagcgg

SEQ ID NO: 2160 - RNA, 17 nt, Artificial Sequence
  Synthetic
augacuaucuuuaaugu

SEQ ID NO: 2161 - RNA, 17 nt, Artificial Sequence
  Synthetic
ugacuaucuuuaauguc

SEQ ID NO: 2162 - RNA, 17 nt, Artificial Sequence
  Synthetic
augucuggaaauucuuc

SEQ ID NO: 2163 - RNA, 17 nt, Artificial Sequence
  Synthetic
gaauugauacugacugu

SEQ ID NO: 2164 - RNA, 17 nt, Artificial Sequence
  Synthetic
aauugauacugacugua

SEQ ID NO: 2165 - RNA, 17 nt, Artificial Sequence
  Synthetic
uacugacuguauggaaa

SEQ ID NO: 2166 - RNA, 17 nt, Artificial Sequence
  Synthetic
cugacuguauggaaaau

SEQ ID NO: 2167 - RNA, 17 nt, Artificial Sequence
  Synthetic
ugagagcugcaggugua

SEQ ID NO: 2168 - RNA, 17 nt, Artificial Sequence
  Synthetic
uaaugaagaccuucuuu

SEQ ID NO: 2169 - RNA, 20 nt, Artificial Sequence
  Synthetic
auggacgacagccagguacc

SEQ ID NO: 2170 - RNA, 20 nt, Artificial Sequence
  Synthetic
gauugucaggaggaugauga

SEQ ID NO: 2171 - RNA, 20 nt, Artificial Sequence
  Synthetic
gagcggaggcaggaggcggg

SEQ ID NO: 2172 - RNA, 20 nt, Artificial Sequence
  Synthetic
gcgggcugcgauuugcuuca

SEQ ID NO: 2173 - RNA, 20 nt, Artificial Sequence
  Synthetic
cgauguauaauaauugaugu

SEQ ID NO: 2174 - RNA, 17 nt, Artificial Sequence
  Synthetic
gacgacagccagguacc

SEQ ID NO: 2175 - RNA, 17 nt, Artificial Sequence
  Synthetic
ugucaggaggaugauga

SEQ ID NO: 2176 - RNA, 17 nt, Artificial Sequence
  Synthetic
cggaggcaggaggcggg

SEQ ID NO: 2177 - RNA, 17 nt, Artificial Sequence
  Synthetic
ggcugcgauuugcuuca

SEQ ID NO: 2178 - RNA, 17 nt, Artificial Sequence
  Synthetic
uguauaauaauugaugu

SEQ ID NO: 2179 - RNA, 20 nt, Artificial Sequence
  Synthetic
ugugaggcuuaucuucacca

SEQ ID NO: 2180 - RNA, 20 nt, Artificial Sequence
  Synthetic
aaguuacuguuauagagggu

SEQ ID NO: 2181 - RNA, 20 nt, Artificial Sequence
  Synthetic
uuuauuuggcaucuguuuaa

SEQ ID NO: 2182 - RNA, 20 nt, Artificial Sequence
  Synthetic
aaaagaaagccucagagaau

SEQ ID NO: 2183 - RNA, 20 nt, Artificial Sequence
  Synthetic
uauggggagaaaagacauga

SEQ ID NO: 2184 - RNA, 20 nt, Artificial Sequence
  Synthetic
aaagaaaugacacuuuucau

SEQ ID NO: 2185 - RNA, 20 nt, Artificial Sequence
  Synthetic
ugcagagucagcagaacugg

SEQ ID NO: 2186 - RNA, 20 nt, Artificial Sequence
  Synthetic
gagagaaucccuagucuuca

SEQ ID NO: 2187 - RNA, 20 nt, Artificial Sequence
  Synthetic
gagguuuaggucaagaagaa

SEQ ID NO: 2188 - RNA, 20 nt, Artificial Sequence
  Synthetic
ucacugaaugcuucugacuu

SEQ ID NO: 2189 - RNA, 20 nt, Artificial Sequence
  Synthetic
ugaggggucuccaggaggag

SEQ ID NO: 2190 - RNA, 20 nt, Artificial Sequence
  Synthetic
gcucacacaugagaucuagg

SEQ ID NO: 2191 - RNA, 20 nt, Artificial Sequence
  Synthetic
acacaugagaucuaggugag

SEQ ID NO: 2192 - RNA, 20 nt, Artificial Sequence
  Synthetic
agucauuucauggguuguug

SEQ ID NO: 2193 - RNA, 20 nt, Artificial Sequence
  Synthetic
guuuuuuucuguucugucuc

SEQ ID NO: 2194 - RNA, 17 nt, Artificial Sequence
  Synthetic
gaggcuuaucuucacca

SEQ ID NO: 2195 - RNA, 17 nt, Artificial Sequence
  Synthetic
uuacuguuauagagggu

SEQ ID NO: 2196 - RNA, 17 nt, Artificial Sequence
  Synthetic
auuuggcaucuguuuaa

SEQ ID NO: 2197 - RNA, 17 nt, Artificial Sequence
  Synthetic
agaaagccucagagaau

SEQ ID NO: 2198 - RNA, 17 nt, Artificial Sequence
  Synthetic
ggggagaaaagacauga

SEQ ID NO: 2199 - RNA, 17 nt, Artificial Sequence
  Synthetic
gaaaugacacuuuucau

SEQ ID NO: 2200 - RNA, 17 nt, Artificial Sequence
  Synthetic
agagucagcagaacugg

SEQ ID NO: 2201 - RNA, 17 nt, Artificial Sequence
  Synthetic
agaaucccuagucuuca

SEQ ID NO: 2202 - RNA, 17 nt, Artificial Sequence
  Synthetic
guuuaggucaagaagaa

SEQ ID NO: 2203 - RNA, 17 nt, Artificial Sequence
  Synthetic
cugaaugcuucugacuu

SEQ ID NO: 2204 - RNA, 17 nt, Artificial Sequence
  Synthetic
ggggucuccaggaggag

SEQ ID NO: 2205 - RNA, 17 nt, Artificial Sequence
  Synthetic
cacacaugagaucuagg

SEQ ID NO: 2206 - RNA, 17 nt, Artificial Sequence
  Synthetic
caugagaucuaggugag

SEQ ID NO: 2207 - RNA, 17 nt, Artificial Sequence
  Synthetic
cauuucauggguuguug

SEQ ID NO: 2208 - RNA, 17 nt, Artificial Sequence
  Synthetic
uuuuucuguucugucuc

SEQ ID NO: 2209 - RNA, 20 nt, Artificial Sequence
  Synthetic
uucauuucaaagggagggag

SEQ ID NO: 2210 - RNA, 20 nt, Artificial Sequence
  Synthetic
ucuccaaucugcuugaagac

SEQ ID NO: 2211 - RNA, 20 nt, Artificial Sequence
  Synthetic
ugcuauuuuucaucaacaua

SEQ ID NO: 2212 - RNA, 20 nt, Artificial Sequence
  Synthetic
ucgacaccgaagcagaguuu

SEQ ID NO: 2213 - RNA, 17 nt, Artificial Sequence
  Synthetic
auuucaaagggagggag

SEQ ID NO: 2214 - RNA, 17 nt, Artificial Sequence
  Synthetic
ccaaucugcuugaagac

SEQ ID NO: 2215 - RNA, 17 nt, Artificial Sequence
  Synthetic
uauuuuucaucaacaua

SEQ ID NO: 2216 - RNA, 17 nt, Artificial Sequence
  Synthetic
acaccgaagcagaguuu

SEQ ID NO: 2217 - RNA, 17 nt, Artificial Sequence
  Synthetic
cucagaagcuaacuaac

SEQ ID NO: 2218 - RNA, 17 nt, Artificial Sequence
  Synthetic
uuacgggcuuuucucac

SEQ ID NO: 2219 - RNA, 17 nt, Artificial Sequence
  Synthetic
ugagagguuacuuaccg

SEQ ID NO: 2220 - RNA, 20 nt, Artificial Sequence
  Synthetic
agaauagaucucuggucuga

SEQ ID NO: 2221 - RNA, 20 nt, Artificial Sequence
  Synthetic
cuggucugaagguuuauuua

SEQ ID NO: 2222 - RNA, 20 nt, Artificial Sequence
  Synthetic
caucucagaagcuaacuaac

SEQ ID NO: 2223 - RNA, 20 nt, Artificial Sequence
  Synthetic
uggucugaagguuuauuuac

SEQ ID NO: 2224 - RNA, 20 nt, Artificial Sequence
  Synthetic
ccccuacaagaaacucuccc

SEQ ID NO: 2225 - RNA, 20 nt, Artificial Sequence
  Synthetic
gauaggggauacggggagag

SEQ ID NO: 2226 - RNA, 20 nt, Artificial Sequence
  Synthetic
ccggggagaguuucuuguag

SEQ ID NO: 2227 - RNA, 20 nt, Artificial Sequence
  Synthetic
agcugagagguuacuuaccg

SEQ ID NO: 2228 - RNA, 20 nt, Artificial Sequence
  Synthetic
aagauaauuguaugagcacu

SEQ ID NO: 2229 - RNA, 20 nt, Artificial Sequence
  Synthetic
ucccccucuacauuuaaagu

SEQ ID NO: 2230 - RNA, 17 nt, Artificial Sequence
  Synthetic
gggagaguggagaaaaa

SEQ ID NO: 2231 - RNA, 17 nt, Artificial Sequence
  Synthetic
ggggagaguggagaaaa

SEQ ID NO: 2232 - RNA, 17 nt, Artificial Sequence
  Synthetic
ucuuuaagauaaggaaa

SEQ ID NO: 2233 - RNA, 17 nt, Artificial Sequence
  Synthetic
ucaacaguaaggcuaaa

SEQ ID NO: 2234 - RNA, 17 nt, Artificial Sequence
  Synthetic
gagugaaagacuuuaaa

SEQ ID NO: 2235 - RNA, 17 nt, Artificial Sequence
  Synthetic
aucuuuaagauaaggaa

SEQ ID NO: 2236 - RNA, 17 nt, Artificial Sequence
  Synthetic
aguuucuuguaggggaa

SEQ ID NO: 2237 - RNA, 17 nt, Artificial Sequence
  Synthetic
gaaaauauaaagaauaa

SEQ ID NO: 2238 - RNA, 17 nt, Artificial Sequence
  Synthetic
ugagugaaagacuuuaa

SEQ ID NO: 2239 - RNA, 17 nt, Artificial Sequence
  Synthetic
gagaaaaaggggacaca

SEQ ID NO: 2240 - RNA, 17 nt, Artificial Sequence
  Synthetic
auuuguacaagaucaca

SEQ ID NO: 2241 - RNA, 17 nt, Artificial Sequence
  Synthetic
uuggaaugaguuucaga

SEQ ID NO: 2242 - RNA, 17 nt, Artificial Sequence
  Synthetic
aggcaucucacuggaga

SEQ ID NO: 2243 - RNA, 17 nt, Artificial Sequence
  Synthetic
ccaacuuuaaauguaga

SEQ ID NO: 2244 - RNA, 17 nt, Artificial Sequence
  Synthetic
cuguuucuuuugaagga

SEQ ID NO: 2245 - RNA, 17 nt, Artificial Sequence
  Synthetic
auagaucucuggucuga

SEQ ID NO: 2246 - RNA, 17 nt, Artificial Sequence
  Synthetic
aucauuaaguguauuga

SEQ ID NO: 2247 - RNA, 17 nt, Artificial Sequence
  Synthetic
aaugcuguuucuuuuga

SEQ ID NO: 2248 - RNA, 17 nt, Artificial Sequence
  Synthetic
auauaaucuuuaagaua

SEQ ID NO: 2249 - RNA, 17 nt, Artificial Sequence
  Synthetic
gggugggauaggggaua

SEQ ID NO: 2250 - RNA, 17 nt, Artificial Sequence
  Synthetic
gggguuggggugggaua

SEQ ID NO: 2251 - RNA, 17 nt, Artificial Sequence
  Synthetic
aaucuuaucuucugcua

SEQ ID NO: 2252 - RNA, 17 nt, Artificial Sequence
  Synthetic
uugccaaaugucuucua

SEQ ID NO: 2253 - RNA, 17 nt, Artificial Sequence
  Synthetic
agggcuuuucaacagua

SEQ ID NO: 2254 - RNA, 17 nt, Artificial Sequence
  Synthetic
cuuucuuuugagaggua

SEQ ID NO: 2255 - RNA, 17 nt, Artificial Sequence
  Synthetic
ggggagaguuucuugua

SEQ ID NO: 2256 - RNA, 17 nt, Artificial Sequence
  Synthetic
gucugaagguuuauuua

SEQ ID NO: 2257 - RNA, 17 nt, Artificial Sequence
  Synthetic
ggagaaaaaggggacac

SEQ ID NO: 2258 - RNA, 17 nt, Artificial Sequence
  Synthetic
gauuuguacaagaucac

SEQ ID NO: 2259 - RNA, 17 nt, Artificial Sequence
  Synthetic
uucagaaggcaucucac

SEQ ID NO: 2260 - RNA, 17 nt, Artificial Sequence
  Synthetic
ggugggauaggggauac

SEQ ID NO: 2261 - RNA, 17 nt, Artificial Sequence
  Synthetic
gcugagagguuacuuac

SEQ ID NO: 2262 - RNA, 17 nt, Artificial Sequence
  Synthetic
ucugaagguuuauuuac

SEQ ID NO: 2263 - RNA, 17 nt, Artificial Sequence
  Synthetic
ugaguaaaagacuuuac

SEQ ID NO: 2264 - RNA, 17 nt, Artificial Sequence
  Synthetic
cugagagguuacuuacc

SEQ ID NO: 2265 - RNA, 17 nt, Artificial Sequence
  Synthetic
cuacaagaaacucuccc

SEQ ID NO: 2266 - RNA, 17 nt, Artificial Sequence
  Synthetic
aauguagagggggaucc

SEQ ID NO: 2267 - RNA, 17 nt, Artificial Sequence
  Synthetic
ggguuaaugugaagucc

SEQ ID NO: 2268 - RNA, 17 nt, Artificial Sequence
  Synthetic
gauuugcacagcucauc

SEQ ID NO: 2269 - RNA, 17 nt, Artificial Sequence
  Synthetic
gcuagagaauagaucuc

SEQ ID NO: 2270 - RNA, 17 nt, Artificial Sequence
  Synthetic
ggaugucucagcucuuc

SEQ ID NO: 2271 - RNA, 17 nt, Artificial Sequence
  Synthetic
ggagaguggagaaaaag

SEQ ID NO: 2272 - RNA, 17 nt, Artificial Sequence
  Synthetic
aggggauacggggagag

SEQ ID NO: 2273 - RNA, 17 nt, Artificial Sequence
  Synthetic
caacuuuaaauguagag

SEQ ID NO: 2274 - RNA, 17 nt, Artificial Sequence
  Synthetic
aaggcaucucacuggag

SEQ ID NO: 2275 - RNA, 17 nt, Artificial Sequence
  Synthetic
caggccaagcagcugag

SEQ ID NO: 2276 - RNA, 17 nt, Artificial Sequence
  Synthetic
caaaucuuucuuuugag

SEQ ID NO: 2277 - RNA, 17 nt, Artificial Sequence
  Synthetic
ggguuggggugggauag

SEQ ID NO: 2278 - RNA, 17 nt, Artificial Sequence
  Synthetic
accaacuuuaaauguag

SEQ ID NO: 2279 - RNA, 17 nt, Artificial Sequence
  Synthetic
uaacagauucuguguag

SEQ ID NO: 2280 - RNA, 17 nt, Artificial Sequence
  Synthetic
gggagaguuucuuguag

SEQ ID NO: 2281 - RNA, 17 nt, Artificial Sequence
  Synthetic
gugggauaggggauacg

SEQ ID NO: 2282 - RNA, 17 nt, Artificial Sequence
  Synthetic
gcuguuucuuuugaagg

SEQ ID NO: 2283 - RNA, 17 nt, Artificial Sequence
  Synthetic
aacuuuaaauguagagg

SEQ ID NO: 2284 - RNA, 17 nt, Artificial Sequence
  Synthetic
uuucuuuugaaggaggg

SEQ ID NO: 2285 - RNA, 17 nt, Artificial Sequence
  Synthetic
cuguguggggguugggg

SEQ ID NO: 2286 - RNA, 17 nt, Artificial Sequence
  Synthetic
agaacaauaauauuggg

SEQ ID NO: 2287 - RNA, 17 nt, Artificial Sequence
  Synthetic
ggugagcaucugugugg

SEQ ID NO: 2288 - RNA, 17 nt, Artificial Sequence
  Synthetic
uuucuuuuacuaaaaug

SEQ ID NO: 2289 - RNA, 17 nt, Artificial Sequence
  Synthetic
gguggugagcaucugug

SEQ ID NO: 2290 - RNA, 17 nt, Artificial Sequence
  Synthetic
uggugagcaucugugug

SEQ ID NO: 2291 - RNA, 17 nt, Artificial Sequence
  Synthetic
caucuguguggggguug

SEQ ID NO: 2292 - RNA, 17 nt, Artificial Sequence
  Synthetic
ggggguuggggugggau

SEQ ID NO: 2293 - RNA, 17 nt, Artificial Sequence
  Synthetic
acagagaacaauaauau

SEQ ID NO: 2294 - RNA, 17 nt, Artificial Sequence
  Synthetic
ugccaaaugucuucuau

SEQ ID NO: 2295 - RNA, 17 nt, Artificial Sequence
  Synthetic
auaauuguaugagcacu

SEQ ID NO: 2296 - RNA, 17 nt, Artificial Sequence
  Synthetic
guaaccucucagcugcu

SEQ ID NO: 2297 - RNA, 17 nt, Artificial Sequence
  Synthetic
acaaaucauuugcuucu

SEQ ID NO: 2298 - RNA, 17 nt, Artificial Sequence
  Synthetic
auagacaguauaaaagu

SEQ ID NO: 2299 - RNA, 17 nt, Artificial Sequence
  Synthetic
cccucuacauuuaaagu

SEQ ID NO: 2300 - RNA, 17 nt, Artificial Sequence
  Synthetic
uuaaaguugguuuaagu

SEQ ID NO: 2301 - RNA, 17 nt, Artificial Sequence
  Synthetic
aacagauucuguguagu

SEQ ID NO: 2302 - RNA, 17 nt, Artificial Sequence
  Synthetic
agcaucugugugggggu

SEQ ID NO: 2303 - RNA, 17 nt, Artificial Sequence
  Synthetic
uguguggggguuggggu

SEQ ID NO: 2304 - RNA, 17 nt, Artificial Sequence
  Synthetic
uucuuuuacuaaaaugu

SEQ ID NO: 2305 - RNA, 17 nt, Artificial Sequence
  Synthetic
guggugagcaucugugu

SEQ ID NO: 2306 - RNA, 17 nt, Artificial Sequence
  Synthetic
cggggagaguuucuugu

SEQ ID NO: 2307 - RNA, 17 nt, Artificial Sequence
  Synthetic
aacccauagaagacauu

SEQ ID NO: 2308 - RNA, 17 nt, Artificial Sequence
  Synthetic
cagagaacaauaauauu

SEQ ID NO: 2309 - RNA, 17 nt, Artificial Sequence
  Synthetic
aggaaagggucacaguu

SEQ ID NO: 2310 - RNA, 17 nt, Artificial Sequence
  Synthetic
gcaucuguguggggguu

SEQ ID NO: 2311 - RNA, 20 nt, Artificial Sequence
  Synthetic
acggggagaguggagaaaaa

SEQ ID NO: 2312 - RNA, 20 nt, Artificial Sequence
  Synthetic
uacggggagaguggagaaaa

SEQ ID NO: 2313 - RNA, 20 nt, Artificial Sequence
  Synthetic
uaaucuuuaagauaaggaaa

SEQ ID NO: 2314 - RNA, 20 nt, Artificial Sequence
  Synthetic
uuuucaacaguaaggcuaaa

SEQ ID NO: 2315 - RNA, 20 nt, Artificial Sequence
  Synthetic
ugugagugaaagacuuuaaa

SEQ ID NO: 2316 - RNA, 20 nt, Artificial Sequence
  Synthetic
auaaucuuuaagauaaggaa

SEQ ID NO: 2317 - RNA, 20 nt, Artificial Sequence
  Synthetic
gagaguuucuuguaggggaa

SEQ ID NO: 2318 - RNA, 20 nt, Artificial Sequence
  Synthetic
uuagaaaauauaaagaauaa

SEQ ID NO: 2319 - RNA, 20 nt, Artificial Sequence
  Synthetic
uugugagugaaagacuuuaa

SEQ ID NO: 2320 - RNA, 20 nt, Artificial Sequence
  Synthetic
guggagaaaaaggggacaca

SEQ ID NO: 2321 - RNA, 20 nt, Artificial Sequence
  Synthetic
augauuuguacaagaucaca

SEQ ID NO: 2322 - RNA, 20 nt, Artificial Sequence
  Synthetic
aguuuggaaugaguuucaga

SEQ ID NO: 2323 - RNA, 20 nt, Artificial Sequence
  Synthetic
agaaggcaucucacuggaga

SEQ ID NO: 2324 - RNA, 20 nt, Artificial Sequence
  Synthetic
aaaccaacuuuaaauguaga

SEQ ID NO: 2325 - RNA, 20 nt, Artificial Sequence
  Synthetic
augcuguuucuuuugaagga

SEQ ID NO: 2326 - RNA, 20 nt, Artificial Sequence
  Synthetic
uaaaucauuaaguguauuga

SEQ ID NO: 2327 - RNA, 20 nt, Artificial Sequence
  Synthetic
ggaaaugcuguuucuuuuga

SEQ ID NO: 2328 - RNA, 20 nt, Artificial Sequence
  Synthetic
aaaauauaaucuuuaagaua

SEQ ID NO: 2329 - RNA, 20 nt, Artificial Sequence
  Synthetic
uuggggugggauaggggaua

SEQ ID NO: 2330 - RNA, 20 nt, Artificial Sequence
  Synthetic
guggggguuggggugggaua

SEQ ID NO: 2331 - RNA, 20 nt, Artificial Sequence
  Synthetic
ugaaaucuuaucuucugcua

SEQ ID NO: 2332 - RNA, 20 nt, Artificial Sequence
  Synthetic
uguuugccaaaugucuucua

SEQ ID NO: 2333 - RNA, 20 nt, Artificial Sequence
  Synthetic
cacagggcuuuucaacagua

SEQ ID NO: 2334 - RNA, 20 nt, Artificial Sequence
  Synthetic
aaucuuucuuuugagaggua

SEQ ID NO: 2335 - RNA, 20 nt, Artificial Sequence
  Synthetic
accggggagaguuucuugua

SEQ ID NO: 2336 - RNA, 20 nt, Artificial Sequence
  Synthetic
aguggagaaaaaggggacac

SEQ ID NO: 2337 - RNA, 20 nt, Artificial Sequence
  Synthetic
aaugauuuguacaagaucac

SEQ ID NO: 2338 - RNA, 20 nt, Artificial Sequence
  Synthetic
auauucagaaggcaucucac

SEQ ID NO: 2339 - RNA, 20 nt, Artificial Sequence
  Synthetic
uauuuacgggcuuuucucac

SEQ ID NO: 2340 - RNA, 20 nt, Artificial Sequence
  Synthetic
uggggugggauaggggauac

SEQ ID NO: 2341 - RNA, 20 nt, Artificial Sequence
  Synthetic
gcagcugagagguuacuuac

SEQ ID NO: 2342 - RNA, 20 nt, Artificial Sequence
  Synthetic
agaugaguaaaagacuuuac

SEQ ID NO: 2343 - RNA, 20 nt, Artificial Sequence
  Synthetic
cagcugagagguuacuuacc

SEQ ID NO: 2344 - RNA, 20 nt, Artificial Sequence
  Synthetic
uuaaauguagagggggaucc

SEQ ID NO: 2345 - RNA, 20 nt, Artificial Sequence
  Synthetic
acaggguuaaugugaagucc

SEQ ID NO: 2346 - RNA, 20 nt, Artificial Sequence
  Synthetic
auugauuugcacagcucauc

SEQ ID NO: 2347 - RNA, 20 nt, Artificial Sequence
  Synthetic
uaagcuagagaauagaucuc

SEQ ID NO: 2348 - RNA, 20 nt, Artificial Sequence
  Synthetic
aacggaugucucagcucuuc

SEQ ID NO: 2349 - RNA, 20 nt, Artificial Sequence
  Synthetic
cggggagaguggagaaaaag

SEQ ID NO: 2350 - RNA, 20 nt, Artificial Sequence
  Synthetic
aaccaacuuuaaauguagag

SEQ ID NO: 2351 - RNA, 20 nt, Artificial Sequence
  Synthetic
cagaaggcaucucacuggag

SEQ ID NO: 2352 - RNA, 20 nt, Artificial Sequence
  Synthetic
uaacaggccaagcagcugag

SEQ ID NO: 2353 - RNA, 20 nt, Artificial Sequence
  Synthetic
cugcaaaucuuucuuuugag

SEQ ID NO: 2354 - RNA, 20 nt, Artificial Sequence
  Synthetic
uggggguuggggugggauag

SEQ ID NO: 2355 - RNA, 20 nt, Artificial Sequence
  Synthetic
uaaaccaacuuuaaauguag

SEQ ID NO: 2356 - RNA, 20 nt, Artificial Sequence
  Synthetic
uucuaacagauucuguguag

SEQ ID NO: 2357 - RNA, 20 nt, Artificial Sequence
  Synthetic
ggggugggauaggggauacg

SEQ ID NO: 2358 - RNA, 20 nt, Artificial Sequence
  Synthetic
aaugcuguuucuuuugaagg

SEQ ID NO: 2359 - RNA, 20 nt, Artificial Sequence
  Synthetic
accaacuuuaaauguagagg

SEQ ID NO: 2360 - RNA, 20 nt, Artificial Sequence
  Synthetic
cuguuucuuuugaaggaggg

SEQ ID NO: 2361 - RNA, 20 nt, Artificial Sequence
  Synthetic
caucuguguggggguugggg

SEQ ID NO: 2362 - RNA, 20 nt, Artificial Sequence
  Synthetic
cagagaacaauaauauuggg

SEQ ID NO: 2363 - RNA, 20 nt, Artificial Sequence
  Synthetic
gguggugagcaucugugugg

SEQ ID NO: 2364 - RNA, 20 nt, Artificial Sequence
  Synthetic
uaauuucuuuuacuaaaaug

SEQ ID NO: 2365 - RNA, 20 nt, Artificial Sequence
  Synthetic
uuggguggugagcaucugug

SEQ ID NO: 2366 - RNA, 20 nt, Artificial Sequence
  Synthetic
ggguggugagcaucugugug

SEQ ID NO: 2367 - RNA, 20 nt, Artificial Sequence
  Synthetic
gagcaucuguguggggguug

SEQ ID NO: 2368 - RNA, 20 nt, Artificial Sequence
  Synthetic
uguggggguuggggugggau

SEQ ID NO: 2369 - RNA, 20 nt, Artificial Sequence
  Synthetic
uuuacagagaacaauaauau

SEQ ID NO: 2370 - RNA, 20 nt, Artificial Sequence
  Synthetic
guuugccaaaugucuucuau

SEQ ID NO: 2371 - RNA, 20 nt, Artificial Sequence
  Synthetic
uaaguaaccucucagcugcu

SEQ ID NO: 2372 - RNA, 20 nt, Artificial Sequence
  Synthetic
uguacaaaucauuugcuucu

SEQ ID NO: 2373 - RNA, 20 nt, Artificial Sequence
  Synthetic
cauauagacaguauaaaagu

SEQ ID NO: 2374 - RNA, 20 nt, Artificial Sequence
  Synthetic
cauuuaaaguugguuuaagu

SEQ ID NO: 2375 - RNA, 20 nt, Artificial Sequence
  Synthetic
ucuaacagauucuguguagu

SEQ ID NO: 2376 - RNA, 20 nt, Artificial Sequence
  Synthetic
gugagcaucugugugggggu

SEQ ID NO: 2377 - RNA, 20 nt, Artificial Sequence
  Synthetic
aucuguguggggguuggggu

SEQ ID NO: 2378 - RNA, 20 nt, Artificial Sequence
  Synthetic
aauuucuuuuacuaaaaugu

SEQ ID NO: 2379 - RNA, 20 nt, Artificial Sequence
  Synthetic
uggguggugagcaucugugu

SEQ ID NO: 2380 - RNA, 20 nt, Artificial Sequence
  Synthetic
uaccggggagaguuucuugu

SEQ ID NO: 2381 - RNA, 20 nt, Artificial Sequence
  Synthetic
ggaaacccauagaagacauu

SEQ ID NO: 2382 - RNA, 20 nt, Artificial Sequence
  Synthetic
uuacagagaacaauaauauu

SEQ ID NO: 2383 - RNA, 20 nt, Artificial Sequence
  Synthetic
auaaggaaagggucacaguu

SEQ ID NO: 2384 - RNA, 20 nt, Artificial Sequence
  Synthetic
ugagcaucuguguggggguu

SEQ ID NO: 2385 - RNA, 17 nt, Artificial Sequence
  Synthetic
agagggaagccuaaaaa

SEQ ID NO: 2386 - RNA, 17 nt, Artificial Sequence
  Synthetic
augcuuacugguuugaa

SEQ ID NO: 2387 - RNA, 17 nt, Artificial Sequence
  Synthetic
ggaguuugagacucaca

SEQ ID NO: 2388 - RNA, 17 nt, Artificial Sequence
  Synthetic
uuuuuauucuagagcca

SEQ ID NO: 2389 - RNA, 17 nt, Artificial Sequence
  Synthetic
gccuagucuaaggugca

SEQ ID NO: 2390 - RNA, 17 nt, Artificial Sequence
  Synthetic
uuuuaacuaugggcuca

SEQ ID NO: 2391 - RNA, 17 nt, Artificial Sequence
  Synthetic
uucuagagccaagguca

SEQ ID NO: 2392 - RNA, 17 nt, Artificial Sequence
  Synthetic
cuaauauaucaguuuca

SEQ ID NO: 2393 - RNA, 17 nt, Artificial Sequence
  Synthetic
cuggguccagaaaaaga

SEQ ID NO: 2394 - RNA, 17 nt, Artificial Sequence
  Synthetic
uuuuccuccagacaaga

SEQ ID NO: 2395 - RNA, 17 nt, Artificial Sequence
  Synthetic
gcuugugaucucuaaga

SEQ ID NO: 2396 - RNA, 17 nt, Artificial Sequence
  Synthetic
ggucacggaagcccaga

SEQ ID NO: 2397 - RNA, 17 nt, Artificial Sequence
  Synthetic
aaugcuuacugguuuga

SEQ ID NO: 2398 - RNA, 17 nt, Artificial Sequence
  Synthetic
cacaugacauaaguaua

SEQ ID NO: 2399 - RNA, 17 nt, Artificial Sequence
  Synthetic
cuaaagaguuuuaacua

SEQ ID NO: 2400 - RNA, 17 nt, Artificial Sequence
  Synthetic
cucagcugccuagucua

SEQ ID NO: 2401 - RNA, 17 nt, Artificial Sequence
  Synthetic
aaaaaugagcuuuucua

SEQ ID NO: 2402 - RNA, 17 nt, Artificial Sequence
  Synthetic
uaguauauaauucuuua

SEQ ID NO: 2403 - RNA, 17 nt, Artificial Sequence
  Synthetic
ucacgggugagcuaaac

SEQ ID NO: 2404 - RNA, 17 nt, Artificial Sequence
  Synthetic
aaaacucuuuagacaac

SEQ ID NO: 2405 - RNA, 17 nt, Artificial Sequence
  Synthetic
gggaguuugagacucac

SEQ ID NO: 2406 - RNA, 17 nt, Artificial Sequence
  Synthetic
uuuaacuaugggcucac

SEQ ID NO: 2407 - RNA, 17 nt, Artificial Sequence
  Synthetic
uccucauaaaugcuuac

SEQ ID NO: 2408 - RNA, 17 nt, Artificial Sequence
  Synthetic
caucuuuuucuggaccc

SEQ ID NO: 2409 - RNA, 17 nt, Artificial Sequence
  Synthetic
ucaucuaugaccuuccc

SEQ ID NO: 2410 - RNA, 17 nt, Artificial Sequence
  Synthetic
aauccccacuaagaucc

SEQ ID NO: 2411 - RNA, 17 nt, Artificial Sequence
  Synthetic
agacuaggcaagacagc

SEQ ID NO: 2412 - RNA, 17 nt, Artificial Sequence
  Synthetic
ccagauacauagguggc

SEQ ID NO: 2413 - RNA, 17 nt, Artificial Sequence
  Synthetic
ugccuagucuaaggugc

SEQ ID NO: 2414 - RNA, 17 nt, Artificial Sequence
  Synthetic
uucagauagauuauauc

SEQ ID NO: 2415 - RNA, 17 nt, Artificial Sequence
  Synthetic
ccugccaccuauguauc

SEQ ID NO: 2416 - RNA, 17 nt, Artificial Sequence
  Synthetic
agccacaagaugcccuc

SEQ ID NO: 2417 - RNA, 17 nt, Artificial Sequence
  Synthetic
agggcaucuuguggcuc

SEQ ID NO: 2418 - RNA, 17 nt, Artificial Sequence
  Synthetic
gaaguugugucuaaguc

SEQ ID NO: 2419 - RNA, 17 nt, Artificial Sequence
  Synthetic
uaggcuucccucuuguc

SEQ ID NO: 2420 - RNA, 17 nt, Artificial Sequence
  Synthetic
augaaugucaugcauuc

SEQ ID NO: 2421 - RNA, 17 nt, Artificial Sequence
  Synthetic
aguauauggucaaguuc

SEQ ID NO: 2422 - RNA, 17 nt, Artificial Sequence
  Synthetic
gguuucccaucuuuuuc

SEQ ID NO: 2423 - RNA, 17 nt, Artificial Sequence
  Synthetic
uuuuuccuccagacaag

SEQ ID NO: 2424 - RNA, 17 nt, Artificial Sequence
  Synthetic
ugcccccaauccuacag

SEQ ID NO: 2425 - RNA, 17 nt, Artificial Sequence
  Synthetic
aggucacggaagcccag

SEQ ID NO: 2426 - RNA, 17 nt, Artificial Sequence
  Synthetic
aaaaugagcuuuucuag

SEQ ID NO: 2427 - RNA, 17 nt, Artificial Sequence
  Synthetic
ugaaacugauauauuag

SEQ ID NO: 2428 - RNA, 17 nt, Artificial Sequence
  Synthetic
uggacccaggaucuuag

SEQ ID NO: 2429 - RNA, 17 nt, Artificial Sequence
  Synthetic
uaugccagauacauagg

SEQ ID NO: 2430 - RNA, 17 nt, Artificial Sequence
  Synthetic
gcuucccucuugucugg

SEQ ID NO: 2431 - RNA, 17 nt, Artificial Sequence
  Synthetic
augacauucaucugugg

SEQ ID NO: 2432 - RNA, 17 nt, Artificial Sequence
  Synthetic
ugccucuguaggauugg

SEQ ID NO: 2433 - RNA, 17 nt, Artificial Sequence
  Synthetic
auaucaagcucucuugg

SEQ ID NO: 2434 - RNA, 17 nt, Artificial Sequence
  Synthetic
cauauacuuaugucaug

SEQ ID NO: 2435 - RNA, 17 nt, Artificial Sequence
  Synthetic
accaguaagcauuuaug

SEQ ID NO: 2436 - RNA, 17 nt, Artificial Sequence
  Synthetic
ugcaugacauucaucug

SEQ ID NO: 2437 - RNA, 17 nt, Artificial Sequence
  Synthetic
gacccaggaucuuagug

SEQ ID NO: 2438 - RNA, 17 nt, Artificial Sequence
  Synthetic
acuucacagaaaaugug

SEQ ID NO: 2439 - RNA, 17 nt, Artificial Sequence
  Synthetic
augacaacucuuaauug

SEQ ID NO: 2440 - RNA, 17 nt, Artificial Sequence
  Synthetic
cugccucuguaggauug

SEQ ID NO: 2441 - RNA, 17 nt, Artificial Sequence
  Synthetic
gcccagagggcaucuug

SEQ ID NO: 2442 - RNA, 17 nt, Artificial Sequence
  Synthetic
uuagacacaacuucuug

SEQ ID NO: 2443 - RNA, 17 nt, Artificial Sequence
  Synthetic
cguaauuuugcuguuug

SEQ ID NO: 2444 - RNA, 17 nt, Artificial Sequence
  Synthetic
ugugaggauuuuacaau

SEQ ID NO: 2445 - RNA, 17 nt, Artificial Sequence
  Synthetic
cacuaugccagauacau

SEQ ID NO: 2446 - RNA, 17 nt, Artificial Sequence
  Synthetic
uggguccagaaaaagau

SEQ ID NO: 2447 - RNA, 17 nt, Artificial Sequence
  Synthetic
uaaagaguuuuaacuau

SEQ ID NO: 2448 - RNA, 17 nt, Artificial Sequence
  Synthetic
cugaacuuaaauagacu

SEQ ID NO: 2449 - RNA, 17 nt, Artificial Sequence
  Synthetic
ucccugcaccuuagacu

SEQ ID NO: 2450 - RNA, 17 nt, Artificial Sequence
  Synthetic
cugggcuuccgugaccu

SEQ ID NO: 2451 - RNA, 17 nt, Artificial Sequence
  Synthetic
caucuaugaccuucccu

SEQ ID NO: 2452 - RNA, 17 nt, Artificial Sequence
  Synthetic
auccccacuaagauccu

SEQ ID NO: 2453 - RNA, 17 nt, Artificial Sequence
  Synthetic
gagggcaucuuguggcu

SEQ ID NO: 2454 - RNA, 17 nt, Artificial Sequence
  Synthetic
gccacaagaugcccucu

SEQ ID NO: 2455 - RNA, 17 nt, Artificial Sequence
  Synthetic
gucauaucaagcucucu

SEQ ID NO: 2456 - RNA, 17 nt, Artificial Sequence
  Synthetic
ugaaugucaugcauucu

SEQ ID NO: 2457 - RNA, 17 nt, Artificial Sequence
  Synthetic
uuuauuauauuauuucu

SEQ ID NO: 2458 - RNA, 17 nt, Artificial Sequence
  Synthetic
uaaaaaugagcuuuucu

SEQ ID NO: 2459 - RNA, 17 nt, Artificial Sequence
  Synthetic
ggacccaggaucuuagu

SEQ ID NO: 2460 - RNA, 17 nt, Artificial Sequence
  Synthetic
caagcucucuuggcggu

SEQ ID NO: 2461 - RNA, 17 nt, Artificial Sequence
  Synthetic
uagacacaacuucuugu

SEQ ID NO: 2462 - RNA, 17 nt, Artificial Sequence
  Synthetic
ucugccucuguaggauu

SEQ ID NO: 2463 - RNA, 17 nt, Artificial Sequence
  Synthetic
uagaggaaaauuuuauu

SEQ ID NO: 2464 - RNA, 17 nt, Artificial Sequence
  Synthetic
ucuagaauaaaaagcuu

SEQ ID NO: 2465 - RNA, 17 nt, Artificial Sequence
  Synthetic
uuauuauauuauuucuu

SEQ ID NO: 2466 - RNA, 17 nt, Artificial Sequence
  Synthetic
cacguaauuuugcuguu

SEQ ID NO: 2467 - RNA, 17 nt, Artificial Sequence
  Synthetic
acguaauuuugcuguuu

SEQ ID NO: 2468 - RNA, 17 nt, Artificial Sequence
  Synthetic
uaauuuugaccauuuuu

SEQ ID NO: 2469 - RNA, 20 nt, Artificial Sequence
  Synthetic
acaagagggaagccuaaaaa

SEQ ID NO: 2470 - RNA, 20 nt, Artificial Sequence
  Synthetic
uaaaugcuuacugguuugaa

SEQ ID NO: 2471 - RNA, 20 nt, Artificial Sequence
  Synthetic
cagggaguuugagacucaca

SEQ ID NO: 2472 - RNA, 20 nt, Artificial Sequence
  Synthetic
agcuuuuuauucuagagcca

SEQ ID NO: 2473 - RNA, 20 nt, Artificial Sequence
  Synthetic
gcugccuagucuaaggugca

SEQ ID NO: 2474 - RNA, 20 nt, Artificial Sequence
  Synthetic
gaguuuuaacuaugggcuca

SEQ ID NO: 2475 - RNA, 20 nt, Artificial Sequence
  Synthetic
uuauucuagagccaagguca

SEQ ID NO: 2476 - RNA, 20 nt, Artificial Sequence
  Synthetic
ccucuaauauaucaguuuca

SEQ ID NO: 2477 - RNA, 20 nt, Artificial Sequence
  Synthetic
auccuggguccagaaaaaga

SEQ ID NO: 2478 - RNA, 20 nt, Artificial Sequence
  Synthetic
ucuuuuuccuccagacaaga

SEQ ID NO: 2479 - RNA, 20 nt, Artificial Sequence
  Synthetic
uuggcuugugaucucuaaga

SEQ ID NO: 2480 - RNA, 20 nt, Artificial Sequence
  Synthetic
caaggucacggaagcccaga

SEQ ID NO: 2481 - RNA, 20 nt, Artificial Sequence
  Synthetic
auaaaugcuuacugguuuga

SEQ ID NO: 2482 - RNA, 20 nt, Artificial Sequence
  Synthetic
uuccacaugacauaaguaua

SEQ ID NO: 2483 - RNA, 20 nt, Artificial Sequence
  Synthetic
ugucuaaagaguuuuaacua

SEQ ID NO: 2484 - RNA, 20 nt, Artificial Sequence
  Synthetic
ucucucagcugccuagucua

SEQ ID NO: 2485 - RNA, 20 nt, Artificial Sequence
  Synthetic
auuaaaaaugagcuuuucua

SEQ ID NO: 2486 - RNA, 20 nt, Artificial Sequence
  Synthetic
aguuaguauauaauucuuua

SEQ ID NO: 2487 - RNA, 20 nt, Artificial Sequence
  Synthetic
ggcucacgggugagcuaaac

SEQ ID NO: 2488 - RNA, 20 nt, Artificial Sequence
  Synthetic
guuaaaacucuuuagacaac

SEQ ID NO: 2489 - RNA, 20 nt, Artificial Sequence
  Synthetic
gcagggaguuugagacucac

SEQ ID NO: 2490 - RNA, 20 nt, Artificial Sequence
  Synthetic
aguuuuaacuaugggcucac

SEQ ID NO: 2491 - RNA, 20 nt, Artificial Sequence
  Synthetic
gaguccucauaaaugcuuac

SEQ ID NO: 2492 - RNA, 20 nt, Artificial Sequence
  Synthetic
ucccaucuuuuucuggaccc

SEQ ID NO: 2493 - RNA, 20 nt, Artificial Sequence
  Synthetic
uugucaucuaugaccuuccc

SEQ ID NO: 2494 - RNA, 20 nt, Artificial Sequence
  Synthetic
gaaaauccccacuaagaucc

SEQ ID NO: 2495 - RNA, 20 nt, Artificial Sequence
  Synthetic
aauagacuaggcaagacagc

SEQ ID NO: 2496 - RNA, 20 nt, Artificial Sequence
  Synthetic
augccagauacauagguggc

SEQ ID NO: 2497 - RNA, 20 nt, Artificial Sequence
  Synthetic
agcugccuagucuaaggugc

SEQ ID NO: 2498 - RNA, 20 nt, Artificial Sequence
  Synthetic
agcuucagauagauuauauc

SEQ ID NO: 2499 - RNA, 20 nt, Artificial Sequence
  Synthetic
aauccugccaccuauguauc

SEQ ID NO: 2500 - RNA, 20 nt, Artificial Sequence
  Synthetic
ccgagccacaagaugcccuc

SEQ ID NO: 2501 - RNA, 20 nt, Artificial Sequence
  Synthetic
cagagggcaucuuguggcuc

SEQ ID NO: 2502 - RNA, 20 nt, Artificial Sequence
  Synthetic
caagaaguugugucuaaguc

SEQ ID NO: 2503 - RNA, 20 nt, Artificial Sequence
  Synthetic
uuuuaggcuucccucuuguc

SEQ ID NO: 2504 - RNA, 20 nt, Artificial Sequence
  Synthetic
cagaugaaugucaugcauuc

SEQ ID NO: 2505 - RNA, 20 nt, Artificial Sequence
  Synthetic
auaaguauauggucaaguuc

SEQ ID NO: 2506 - RNA, 20 nt, Artificial Sequence
  Synthetic
acagguuucccaucuuuuuc

SEQ ID NO: 2507 - RNA, 20 nt, Artificial Sequence
  Synthetic
uucuuuuuccuccagacaag

SEQ ID NO: 2508 - RNA, 20 nt, Artificial Sequence
  Synthetic
acgugcccccaauccuacag

SEQ ID NO: 2509 - RNA, 20 nt, Artificial Sequence
  Synthetic
ccaaggucacggaagcccag

SEQ ID NO: 2510 - RNA, 20 nt, Artificial Sequence
  Synthetic
uuaaaaaugagcuuuucuag

SEQ ID NO: 2511 - RNA, 20 nt, Artificial Sequence
  Synthetic
ccaugaaacugauauauuag

SEQ ID NO: 2512 - RNA, 20 nt, Artificial Sequence
  Synthetic
uucuggacccaggaucuuag

SEQ ID NO: 2513 - RNA, 20 nt, Artificial Sequence
  Synthetic
cacuaugccagauacauagg

SEQ ID NO: 2514 - RNA, 20 nt, Artificial Sequence
  Synthetic
uaggcuucccucuugucugg

SEQ ID NO: 2515 - RNA, 20 nt, Artificial Sequence
  Synthetic
ugcaugacauucaucugugg

SEQ ID NO: 2516 - RNA, 20 nt, Artificial Sequence
  Synthetic
gucauaucaagcucucuugg

SEQ ID NO: 2517 - RNA, 20 nt, Artificial Sequence
  Synthetic
gaccauauacuuaugucaug

SEQ ID NO: 2518 - RNA, 20 nt, Artificial Sequence
  Synthetic
caaaccaguaagcauuuaug

SEQ ID NO: 2519 - RNA, 20 nt, Artificial Sequence
  Synthetic
gaaugcaugacauucaucug

SEQ ID NO: 2520 - RNA, 20 nt, Artificial Sequence
  Synthetic
cuggacccaggaucuuagug

SEQ ID NO: 2521 - RNA, 20 nt, Artificial Sequence
  Synthetic
caaacuucacagaaaaugug

SEQ ID NO: 2522 - RNA, 20 nt, Artificial Sequence
  Synthetic
uguaugacaacucuuaauug

SEQ ID NO: 2523 - RNA, 20 nt, Artificial Sequence
  Synthetic
gaagcccagagggcaucuug

SEQ ID NO: 2524 - RNA, 20 nt, Artificial Sequence
  Synthetic
gacuuagacacaacuucuug

SEQ ID NO: 2525 - RNA, 20 nt, Artificial Sequence
  Synthetic
gcacguaauuuugcuguuug

SEQ ID NO: 2526 - RNA, 20 nt, Artificial Sequence
  Synthetic
aaaugugaggauuuuacaau

SEQ ID NO: 2527 - RNA, 20 nt, Artificial Sequence
  Synthetic
ucacacuaugccagauacau

SEQ ID NO: 2528 - RNA, 20 nt, Artificial Sequence
  Synthetic
uccuggguccagaaaaagau

SEQ ID NO: 2529 - RNA, 20 nt, Artificial Sequence
  Synthetic
gucuaaagaguuuuaacuau

SEQ ID NO: 2530 - RNA, 20 nt, Artificial Sequence
  Synthetic
cagcugaacuuaaauagacu

SEQ ID NO: 2531 - RNA, 20 nt, Artificial Sequence
  Synthetic
aacucccugcaccuuagacu

SEQ ID NO: 2532 - RNA, 20 nt, Artificial Sequence
  Synthetic
ccucugggcuuccgugaccu

SEQ ID NO: 2533 - RNA, 20 nt, Artificial Sequence
  Synthetic
ugucaucuaugaccuucccu

SEQ ID NO: 2534 - RNA, 20 nt, Artificial Sequence
  Synthetic
aaaauccccacuaagauccu

SEQ ID NO: 2535 - RNA, 20 nt, Artificial Sequence
  Synthetic
ccagagggcaucuuguggcu

SEQ ID NO: 2536 - RNA, 20 nt, Artificial Sequence
  Synthetic
cgagccacaagaugcccucu

SEQ ID NO: 2537 - RNA, 20 nt, Artificial Sequence
  Synthetic
acagucauaucaagcucucu

SEQ ID NO: 2538 - RNA, 20 nt, Artificial Sequence
  Synthetic
agaugaaugucaugcauucu

SEQ ID NO: 2539 - RNA, 20 nt, Artificial Sequence
  Synthetic
uuuuuuauuauauuauuucu

SEQ ID NO: 2540 - RNA, 20 nt, Artificial Sequence
  Synthetic
aauuaaaaaugagcuuuucu

SEQ ID NO: 2541 - RNA, 20 nt, Artificial Sequence
  Synthetic
ucuggacccaggaucuuagu

SEQ ID NO: 2542 - RNA, 20 nt, Artificial Sequence
  Synthetic
uaucaagcucucuuggcggu

SEQ ID NO: 2543 - RNA, 20 nt, Artificial Sequence
  Synthetic
acuuagacacaacuucuugu

SEQ ID NO: 2544 - RNA, 20 nt, Artificial Sequence
  Synthetic
uauuagaggaaaauuuuauu

SEQ ID NO: 2545 - RNA, 20 nt, Artificial Sequence
  Synthetic
ggcucuagaauaaaaagcuu

SEQ ID NO: 2546 - RNA, 20 nt, Artificial Sequence
  Synthetic
uuuuuauuauauuauuucuu

SEQ ID NO: 2547 - RNA, 20 nt, Artificial Sequence
  Synthetic
gggcacguaauuuugcuguu

SEQ ID NO: 2548 - RNA, 20 nt, Artificial Sequence
  Synthetic
ggcacguaauuuugcuguuu

SEQ ID NO: 2549 - RNA, 20 nt, Artificial Sequence
  Synthetic
uauuaauuuugaccauuuuu

SEQ ID NO: 2550 - RNA, 18 nt, Artificial Sequence
  Synthetic
aaguguauugaaggcgaa

SEQ ID NO: 2551 - RNA, 19 nt, Artificial Sequence
  Synthetic
uaaguguauugaaggcgaa

SEQ ID NO: 2552 - RNA, 20 nt, Artificial Sequence
  Synthetic
uuaaguguauugaaggcgaa

SEQ ID NO: 2553 - RNA, 21 nt, Artificial Sequence
  Synthetic
auuaaguguauugaaggcgaa

SEQ ID NO: 2554 - RNA, 22 nt, Artificial Sequence
  Synthetic
cauuaaguguauugaaggcgaa

SEQ ID NO: 2555 - RNA, 23 nt, Artificial Sequence
  Synthetic
ucauuaaguguauugaaggcgaa

SEQ ID NO: 2556 - RNA, 24 nt, Artificial Sequence
  Synthetic
aucauuaaguguauugaaggcgaa

SEQ ID NO: 2557 - RNA, 21 nt, Artificial Sequence
  Synthetic
uucucugcucaucccacuaca

SEQ ID NO: 2558 - RNA, 22 nt, Artificial Sequence
  Synthetic
guucucugcucaucccacuaca

SEQ ID NO: 2559 - RNA, 23 nt, Artificial Sequence
  Synthetic
uguucucugcucaucccacuaca

SEQ ID NO: 2560 - RNA, 24 nt, Artificial Sequence
  Synthetic
uuguucucugcucaucccacuaca

SEQ ID NO: 2561 - RNA, 18 nt, Artificial Sequence
  Synthetic
auuuacgggcuuuucuca

SEQ ID NO: 2562 - RNA, 19 nt, Artificial Sequence
  Synthetic
uauuuacgggcuuuucuca

SEQ ID NO: 2563 - RNA, 20 nt, Artificial Sequence
  Synthetic
uuauuuacgggcuuuucuca

SEQ ID NO: 2564 - RNA, 21 nt, Artificial Sequence
  Synthetic
uuuauuuacgggcuuuucuca

SEQ ID NO: 2565 - RNA, 22 nt, Artificial Sequence
  Synthetic
guuuauuuacgggcuuuucuca

SEQ ID NO: 2566 - RNA, 23 nt, Artificial Sequence
  Synthetic
gguuuauuuacgggcuuuucuca

SEQ ID NO: 2567 - RNA, 24 nt, Artificial Sequence
  Synthetic
agguuuauuuacgggcuuuucuca

SEQ ID NO: 2568 - RNA, 21 nt, Artificial Sequence
  Synthetic
gggagaguuucuuguagggga

SEQ ID NO: 2569 - RNA, 22 nt, Artificial Sequence
  Synthetic
ggggagaguuucuuguagggga

SEQ ID NO: 2570 - RNA, 23 nt, Artificial Sequence
  Synthetic
cggggagaguuucuuguagggga

SEQ ID NO: 2571 - RNA, 24 nt, Artificial Sequence
  Synthetic
ccggggagaguuucuuguagggga

SEQ ID NO: 2572 - RNA, 21 nt, Artificial Sequence
  Synthetic
uucagaaggcaucucacugga

SEQ ID NO: 2573 - RNA, 22 nt, Artificial Sequence
  Synthetic
auucagaaggcaucucacugga

SEQ ID NO: 2574 - RNA, 23 nt, Artificial Sequence
  Synthetic
uauucagaaggcaucucacugga

SEQ ID NO: 2575 - RNA, 24 nt, Artificial Sequence
  Synthetic
auauucagaaggcaucucacugga

SEQ ID NO: 2576 - RNA, 18 nt, Artificial Sequence
  Synthetic
ugagcuuaaaauaagcua

SEQ ID NO: 2577 - RNA, 19 nt, Artificial Sequence
  Synthetic
uugagcuuaaaauaagcua

SEQ ID NO: 2578 - RNA, 20 nt, Artificial Sequence
  Synthetic
guugagcuuaaaauaagcua

SEQ ID NO: 2579 - RNA, 21 nt, Artificial Sequence
  Synthetic
gaaaugcuguuucuuuugaag

SEQ ID NO: 2580 - RNA, 22 nt, Artificial Sequence
  Synthetic
ggaaaugcuguuucuuuugaag

SEQ ID NO: 2581 - RNA, 23 nt, Artificial Sequence
  Synthetic
aggaaaugcuguuucuuuugaag

SEQ ID NO: 2582 - RNA, 24 nt, Artificial Sequence
  Synthetic
uaggaaaugcuguuucuuuugaag

SEQ ID NO: 2583 - RNA, 21 nt, Artificial Sequence
  Synthetic
aaaccaacuuuaaauguagag

SEQ ID NO: 2584 - RNA, 22 nt, Artificial Sequence
  Synthetic
uaaaccaacuuuaaauguagag

SEQ ID NO: 2585 - RNA, 23 nt, Artificial Sequence
  Synthetic
uuaaaccaacuuuaaauguagag

SEQ ID NO: 2586 - RNA, 24 nt, Artificial Sequence
  Synthetic
cuuaaaccaacuuuaaauguagag

SEQ ID NO: 2587 - RNA, 21 nt, Artificial Sequence
  Synthetic
gcuguuucuuuugaaggaggg

SEQ ID NO: 2588 - RNA, 22 nt, Artificial Sequence
  Synthetic
ugcuguuucuuuugaaggaggg

SEQ ID NO: 2589 - RNA, 23 nt, Artificial Sequence
  Synthetic
augcuguuucuuuugaaggaggg

SEQ ID NO: 2590 - RNA, 24 nt, Artificial Sequence
  Synthetic
aaugcuguuucuuuugaaggaggg

SEQ ID NO: 2591 - RNA, 21 nt, Artificial Sequence
  Synthetic
gcugagagguuacuuaccggg

SEQ ID NO: 2592 - RNA, 22 nt, Artificial Sequence
  Synthetic
agcugagagguuacuuaccggg

SEQ ID NO: 2593 - RNA, 23 nt, Artificial Sequence
  Synthetic
cagcugagagguuacuuaccggg

SEQ ID NO: 2594 - RNA, 24 nt, Artificial Sequence
  Synthetic
gcagcugagagguuacuuaccggg

SEQ ID NO: 2595 - RNA, 21 nt, Artificial Sequence
  Synthetic
caaaucuuucuuuugagaggu

SEQ ID NO: 2596 - RNA, 22 nt, Artificial Sequence
  Synthetic
gcaaaucuuucuuuugagaggu

SEQ ID NO: 2597 - RNA, 23 nt, Artificial Sequence
  Synthetic
ugcaaaucuuucuuuugagaggu

SEQ ID NO: 2598 - RNA, 24 nt, Artificial Sequence
  Synthetic
cugcaaaucuuucuuuugagaggu

SEQ ID NO: 2599 - RNA, 21 nt, Artificial Sequence
  Synthetic
aggaaagggucacaguuugga

SEQ ID NO: 2600 - RNA, 22 nt, Artificial Sequence
  Synthetic
aaggaaagggucacaguuugga

SEQ ID NO: 2601 - RNA, 23 nt, Artificial Sequence
  Synthetic
uaaggaaagggucacaguuugga

SEQ ID NO: 2602 - RNA, 24 nt, Artificial Sequence
  Synthetic
auaaggaaagggucacaguuugga

SEQ ID NO: 2603 - RNA, 21 nt, Artificial Sequence
  Synthetic
acacaggguuaaugugaaguc

SEQ ID NO: 2604 - RNA, 22 nt, Artificial Sequence
  Synthetic
gacacaggguuaaugugaaguc

SEQ ID NO: 2605 - RNA, 23 nt, Artificial Sequence
  Synthetic
ggacacaggguuaaugugaaguc

SEQ ID NO: 2606 - RNA, 24 nt, Artificial Sequence
  Synthetic
gggacacaggguuaaugugaaguc

SEQ ID NO: 2607 - RNA, 21 nt, Artificial Sequence
  Synthetic
gccuguuaguuagcuucugag

SEQ ID NO: 2608 - RNA, 22 nt, Artificial Sequence
  Synthetic
ggccuguuaguuagcuucugag

SEQ ID NO: 2609 - RNA, 23 nt, Artificial Sequence
  Synthetic
uggccuguuaguuagcuucugag

SEQ ID NO: 2610 - RNA, 24 nt, Artificial Sequence
  Synthetic
uuggccuguuaguuagcuucugag

SEQ ID NO: 2611 - RNA, 18 nt, Artificial Sequence
  Synthetic
augugggcuuuugacuag

SEQ ID NO: 2612 - RNA, 19 nt, Artificial Sequence
  Synthetic
aaugugggcuuuugacuag

SEQ ID NO: 2613 - RNA, 20 nt, Artificial Sequence
  Synthetic
aaaugugggcuuuugacuag

SEQ ID NO: 2614 - RNA, 21 nt, Artificial Sequence
  Synthetic
aaaaugugggcuuuugacuag

SEQ ID NO: 2615 - RNA, 22 nt, Artificial Sequence
  Synthetic
uaaaaugugggcuuuugacuag

SEQ ID NO: 2616 - RNA, 23 nt, Artificial Sequence
  Synthetic
cuaaaaugugggcuuuugacuag

SEQ ID NO: 2617 - RNA, 24 nt, Artificial Sequence
  Synthetic
acuaaaaugugggcuuuugacuag

SEQ ID NO: 2618 - RNA, 21 nt, Artificial Sequence
  Synthetic
uuucuaacagauucuguguag

SEQ ID NO: 2619 - RNA, 22 nt, Artificial Sequence
  Synthetic
uuuucuaacagauucuguguag

SEQ ID NO: 2620 - RNA, 23 nt, Artificial Sequence
  Synthetic
auuuucuaacagauucuguguag

SEQ ID NO: 2621 - RNA, 24 nt, Artificial Sequence
  Synthetic
uauuuucuaacagauucuguguag

SEQ ID NO: 2622 - RNA, 21 nt, Artificial Sequence
  Synthetic
gggugggauaggggauacggg

SEQ ID NO: 2623 - RNA, 22 nt, Artificial Sequence
  Synthetic
ggggugggauaggggauacggg

SEQ ID NO: 2624 - RNA, 23 nt, Artificial Sequence
  Synthetic
uggggugggauaggggauacggg

SEQ ID NO: 2625 - RNA, 24 nt, Artificial Sequence
  Synthetic
uuggggugggauaggggauacggg

SEQ ID NO: 2626 - RNA, 18 nt, Artificial Sequence
  Synthetic
agcaacucuuaagauaau

SEQ ID NO: 2627 - RNA, 19 nt, Artificial Sequence
  Synthetic
uagcaacucuuaagauaau

SEQ ID NO: 2628 - RNA, 20 nt, Artificial Sequence
  Synthetic
auagcaacucuuaagauaau

SEQ ID NO: 2629 - RNA, 21 nt, Artificial Sequence
  Synthetic
aauagcaacucuuaagauaau

SEQ ID NO: 2630 - RNA, 22 nt, Artificial Sequence
  Synthetic
uaauagcaacucuuaagauaau

SEQ ID NO: 2631 - RNA, 23 nt, Artificial Sequence
  Synthetic
uuaauagcaacucuuaagauaau

SEQ ID NO: 2632 - RNA, 24 nt, Artificial Sequence
  Synthetic
auuaauagcaacucuuaagauaau

SEQ ID NO: 2633 - RNA, 21 nt, Artificial Sequence
  Synthetic
ggugagcaucugugugggggu

SEQ ID NO: 2634 - RNA, 22 nt, Artificial Sequence
  Synthetic
uggugagcaucugugugggggu

SEQ ID NO: 2635 - RNA, 23 nt, Artificial Sequence
  Synthetic
guggugagcaucugugugggggu

SEQ ID NO: 2636 - RNA, 24 nt, Artificial Sequence
  Synthetic
gguggugagcaucugugugggggu

SEQ ID NO: 2637 - RNA, 21 nt, Artificial Sequence
  Synthetic
uuggguggugagcaucugugu

SEQ ID NO: 2638 - RNA, 22 nt, Artificial Sequence
  Synthetic
auuggguggugagcaucugugu

SEQ ID NO: 2639 - RNA, 23 nt, Artificial Sequence
  Synthetic
uauuggguggugagcaucugugu

SEQ ID NO: 2640 - RNA, 24 nt, Artificial Sequence
  Synthetic
auauuggguggugagcaucugugu

SEQ ID NO: 2641 - RNA, 21 nt, Artificial Sequence
  Synthetic
ucaaagauacaaaacaugauu

SEQ ID NO: 2642 - RNA, 22 nt, Artificial Sequence
  Synthetic
aucaaagauacaaaacaugauu

SEQ ID NO: 2643 - RNA, 23 nt, Artificial Sequence
  Synthetic
caucaaagauacaaaacaugauu

SEQ ID NO: 2644 - RNA, 24 nt, Artificial Sequence
  Synthetic
acaucaaagauacaaaacaugauu

SEQ ID NO: 2645 - RNA, 21 nt, Artificial Sequence
  Synthetic
cccucuccagugagaugccuu

SEQ ID NO: 2646 - RNA, 22 nt, Artificial Sequence
  Synthetic
acccucuccagugagaugccuu

SEQ ID NO: 2647 - RNA, 23 nt, Artificial Sequence
  Synthetic
aacccucuccagugagaugccuu

SEQ ID NO: 2648 - RNA, 24 nt, Artificial Sequence
  Synthetic
aaacccucuccagugagaugccuu

SEQ ID NO: 2649 - RNA, 18 nt, Artificial Sequence
  Synthetic
ucugcucaucccacuaca

SEQ ID NO: 2650 - RNA, 19 nt, Artificial Sequence
  Synthetic
cucugcucaucccacuaca

SEQ ID NO: 2651 - RNA, 20 nt, Artificial Sequence
  Synthetic
ucucugcucaucccacuaca

SEQ ID NO: 2652 - RNA, 18 nt, Artificial Sequence
  Synthetic
agaguuucuuguagggga

SEQ ID NO: 2653 - RNA, 19 nt, Artificial Sequence
  Synthetic
gagaguuucuuguagggga

SEQ ID NO: 2654 - RNA, 20 nt, Artificial Sequence
  Synthetic
ggagaguuucuuguagggga

SEQ ID NO: 2655 - RNA, 18 nt, Artificial Sequence
  Synthetic
agaaggcaucucacugga

SEQ ID NO: 2656 - RNA, 19 nt, Artificial Sequence
  Synthetic
cagaaggcaucucacugga

SEQ ID NO: 2657 - RNA, 20 nt, Artificial Sequence
  Synthetic
ucagaaggcaucucacugga

SEQ ID NO: 2658 - RNA, 18 nt, Artificial Sequence
  Synthetic
uagaaaauauaaagaaua

SEQ ID NO: 2659 - RNA, 19 nt, Artificial Sequence
  Synthetic
uuagaaaauauaaagaaua

SEQ ID NO: 2660 - RNA, 20 nt, Artificial Sequence
  Synthetic
guuagaaaauauaaagaaua

SEQ ID NO: 2661 - RNA, 21 nt, Artificial Sequence
  Synthetic
uguuagaaaauauaaagaaua

SEQ ID NO: 2662 - RNA, 22 nt, Artificial Sequence
  Synthetic
cuguuagaaaauauaaagaaua

SEQ ID NO: 2663 - RNA, 23 nt, Artificial Sequence
  Synthetic
ucuguuagaaaauauaaagaaua

SEQ ID NO: 2664 - RNA, 24 nt, Artificial Sequence
  Synthetic
aucuguuagaaaauauaaagaaua

SEQ ID NO: 2665 - RNA, 18 nt, Artificial Sequence
  Synthetic
aaucuguuagaaaauaua

SEQ ID NO: 2666 - RNA, 19 nt, Artificial Sequence
  Synthetic
gaaucuguuagaaaauaua

SEQ ID NO: 2667 - RNA, 20 nt, Artificial Sequence
  Synthetic
agaaucuguuagaaaauaua

SEQ ID NO: 2668 - RNA, 21 nt, Artificial Sequence
  Synthetic
cagaaucuguuagaaaauaua

SEQ ID NO: 2669 - RNA, 22 nt, Artificial Sequence
  Synthetic
acagaaucuguuagaaaauaua

SEQ ID NO: 2670 - RNA, 23 nt, Artificial Sequence
  Synthetic
cacagaaucuguuagaaaauaua

SEQ ID NO: 2671 - RNA, 24 nt, Artificial Sequence
  Synthetic
acacagaaucuguuagaaaauaua

SEQ ID NO: 2672 - RNA, 21 nt, Artificial Sequence
  Synthetic
aguugagcuuaaaauaagcua

SEQ ID NO: 2673 - RNA, 22 nt, Artificial Sequence
  Synthetic
aaguugagcuuaaaauaagcua

SEQ ID NO: 2674 - RNA, 23 nt, Artificial Sequence
  Synthetic
uaaguugagcuuaaaauaagcua

SEQ ID NO: 2675 - RNA, 24 nt, Artificial Sequence
  Synthetic
uuaaguugagcuuaaaauaagcua

SEQ ID NO: 2676 - RNA, 18 nt, Artificial Sequence
  Synthetic
augcuguuucuuuugaag

SEQ ID NO: 2677 - RNA, 19 nt, Artificial Sequence
  Synthetic
aaugcuguuucuuuugaag

SEQ ID NO: 2678 - RNA, 20 nt, Artificial Sequence
  Synthetic
aaaugcuguuucuuuugaag

SEQ ID NO: 2679 - RNA, 18 nt, Artificial Sequence
  Synthetic
ccaacuuuaaauguagag

SEQ ID NO: 2680 - RNA, 19 nt, Artificial Sequence
  Synthetic
accaacuuuaaauguagag

SEQ ID NO: 2681 - RNA, 20 nt, Artificial Sequence
  Synthetic
aaccaacuuuaaauguagag

SEQ ID NO: 2682 - RNA, 18 nt, Artificial Sequence
  Synthetic
guuucuuuugaaggaggg

SEQ ID NO: 2683 - RNA, 19 nt, Artificial Sequence
  Synthetic
uguuucuuuugaaggaggg

SEQ ID NO: 2684 - RNA, 20 nt, Artificial Sequence
  Synthetic
cuguuucuuuugaaggaggg

SEQ ID NO: 2685 - RNA, 18 nt, Artificial Sequence
  Synthetic
gagagguuacuuaccggg

SEQ ID NO: 2686 - RNA, 19 nt, Artificial Sequence
  Synthetic
ugagagguuacuuaccggg

SEQ ID NO: 2687 - RNA, 20 nt, Artificial Sequence
  Synthetic
cugagagguuacuuaccggg

SEQ ID NO: 2688 - RNA, 18 nt, Artificial Sequence
  Synthetic
guuugccaaaugucuucu

SEQ ID NO: 2689 - RNA, 19 nt, Artificial Sequence
  Synthetic
uguuugccaaaugucuucu

SEQ ID NO: 2690 - RNA, 20 nt, Artificial Sequence
  Synthetic
guguuugccaaaugucuucu

SEQ ID NO: 2691 - RNA, 21 nt, Artificial Sequence
  Synthetic
gguguuugccaaaugucuucu

SEQ ID NO: 2692 - RNA, 22 nt, Artificial Sequence
  Synthetic
ugguguuugccaaaugucuucu

SEQ ID NO: 2693 - RNA, 23 nt, Artificial Sequence
  Synthetic
uugguguuugccaaaugucuucu

SEQ ID NO: 2694 - RNA, 24 nt, Artificial Sequence
  Synthetic
cuugguguuugccaaaugucuucu

SEQ ID NO: 2695 - RNA, 18 nt, Artificial Sequence
  Synthetic
aucuuucuuuugagaggu

SEQ ID NO: 2696 - RNA, 19 nt, Artificial Sequence
  Synthetic
aaucuuucuuuugagaggu

SEQ ID NO: 2697 - RNA, 20 nt, Artificial Sequence
  Synthetic
aaaucuuucuuuugagaggu

SEQ ID NO: 2698 - RNA, 18 nt, Artificial Sequence
  Synthetic
gaaaauucugauuaucuu

SEQ ID NO: 2699 - RNA, 19 nt, Artificial Sequence
  Synthetic
agaaaauucugauuaucuu

SEQ ID NO: 2700 - RNA, 20 nt, Artificial Sequence
  Synthetic
aagaaaauucugauuaucuu

SEQ ID NO: 2701 - RNA, 21 nt, Artificial Sequence
  Synthetic
uaagaaaauucugauuaucuu

SEQ ID NO: 2702 - RNA, 22 nt, Artificial Sequence
  Synthetic
uuaagaaaauucugauuaucuu

SEQ ID NO: 2703 - RNA, 23 nt, Artificial Sequence
  Synthetic
guuaagaaaauucugauuaucuu

SEQ ID NO: 2704 - RNA, 24 nt, Artificial Sequence
  Synthetic
gguuaagaaaauucugauuaucuu

SEQ ID NO: 2705 - RNA, 18 nt, Artificial Sequence
  Synthetic
guggagaaaaaggggaca

SEQ ID NO: 2706 - RNA, 19 nt, Artificial Sequence
  Synthetic
aguggagaaaaaggggaca

SEQ ID NO: 2707 - RNA, 20 nt, Artificial Sequence
  Synthetic
gaguggagaaaaaggggaca

SEQ ID NO: 2708 - RNA, 21 nt, Artificial Sequence
  Synthetic
agaguggagaaaaaggggaca

SEQ ID NO: 2709 - RNA, 22 nt, Artificial Sequence
  Synthetic
gagaguggagaaaaaggggaca

SEQ ID NO: 2710 - RNA, 23 nt, Artificial Sequence
  Synthetic
ggagaguggagaaaaaggggaca

SEQ ID NO: 2711 - RNA, 24 nt, Artificial Sequence
  Synthetic
gggagaguggagaaaaaggggaca

SEQ ID NO: 2712 - RNA, 18 nt, Artificial Sequence
  Synthetic
uaaucuuuaagauaagga

SEQ ID NO: 2713 - RNA, 19 nt, Artificial Sequence
  Synthetic
auaaucuuuaagauaagga

SEQ ID NO: 2714 - RNA, 20 nt, Artificial Sequence
  Synthetic
uauaaucuuuaagauaagga

SEQ ID NO: 2715 - RNA, 21 nt, Artificial Sequence
  Synthetic
auauaaucuuuaagauaagga

SEQ ID NO: 2716 - RNA, 22 nt, Artificial Sequence
  Synthetic
aauauaaucuuuaagauaagga

SEQ ID NO: 2717 - RNA, 23 nt, Artificial Sequence
  Synthetic
aaauauaaucuuuaagauaagga

SEQ ID NO: 2718 - RNA, 24 nt, Artificial Sequence
  Synthetic
aaaauauaaucuuuaagauaagga

SEQ ID NO: 2719 - RNA, 18 nt, Artificial Sequence
  Synthetic
aaagggucacaguuugga

SEQ ID NO: 2720 - RNA, 19 nt, Artificial Sequence
  Synthetic
gaaagggucacaguuugga

SEQ ID NO: 2721 - RNA, 20 nt, Artificial Sequence
  Synthetic
ggaaagggucacaguuugga

SEQ ID NO: 2722 - RNA, 18 nt, Artificial Sequence
  Synthetic
uuacagagaacaauaaua

SEQ ID NO: 2723 - RNA, 19 nt, Artificial Sequence
  Synthetic
uuuacagagaacaauaaua

SEQ ID NO: 2724 - RNA, 20 nt, Artificial Sequence
  Synthetic
guuuacagagaacaauaaua

SEQ ID NO: 2725 - RNA, 18 nt, Artificial Sequence
  Synthetic
ggggguuggggugggaua

SEQ ID NO: 2726 - RNA, 19 nt, Artificial Sequence
  Synthetic
uggggguuggggugggaua

SEQ ID NO: 2727 - RNA, 20 nt, Artificial Sequence
  Synthetic
guggggguuggggugggaua

SEQ ID NO: 2728 - RNA, 21 nt, Artificial Sequence
  Synthetic
uguggggguuggggugggaua

SEQ ID NO: 2729 - RNA, 22 nt, Artificial Sequence
  Synthetic
guguggggguuggggugggaua

SEQ ID NO: 2730 - RNA, 23 nt, Artificial Sequence
  Synthetic
uguguggggguuggggugggaua

SEQ ID NO: 2731 - RNA, 24 nt, Artificial Sequence
  Synthetic
cuguguggggguuggggugggaua

SEQ ID NO: 2732 - RNA, 18 nt, Artificial Sequence
  Synthetic
caggguuaaugugaaguc

SEQ ID NO: 2733 - RNA, 19 nt, Artificial Sequence
  Synthetic
acaggguuaaugugaaguc

SEQ ID NO: 2734 - RNA, 20 nt, Artificial Sequence
  Synthetic
cacaggguuaaugugaaguc

SEQ ID NO: 2735 - RNA, 18 nt, Artificial Sequence
  Synthetic
guacaaaucauuugcuuc

SEQ ID NO: 2736 - RNA, 19 nt, Artificial Sequence
  Synthetic
uguacaaaucauuugcuuc

SEQ ID NO: 2737 - RNA, 20 nt, Artificial Sequence
  Synthetic
uuguacaaaucauuugcuuc

SEQ ID NO: 2738 - RNA, 21 nt, Artificial Sequence
  Synthetic
cuuguacaaaucauuugcuuc

SEQ ID NO: 2739 - RNA, 22 nt, Artificial Sequence
  Synthetic
ucuuguacaaaucauuugcuuc

SEQ ID NO: 2740 - RNA, 23 nt, Artificial Sequence
  Synthetic
aucuuguacaaaucauuugcuuc

SEQ ID NO: 2741 - RNA, 24 nt, Artificial Sequence
  Synthetic
gaucuuguacaaaucauuugcuuc

SEQ ID NO: 2742 - RNA, 18 nt, Artificial Sequence
  Synthetic
agaaagauuugcagagag

SEQ ID NO: 2743 - RNA, 19 nt, Artificial Sequence
  Synthetic
aagaaagauuugcagagag

SEQ ID NO: 2744 - RNA, 20 nt, Artificial Sequence
  Synthetic
aaagaaagauuugcagagag

SEQ ID NO: 2745 - RNA, 21 nt, Artificial Sequence
  Synthetic
aaaagaaagauuugcagagag

SEQ ID NO: 2746 - RNA, 22 nt, Artificial Sequence
  Synthetic
caaaagaaagauuugcagagag

SEQ ID NO: 2747 - RNA, 23 nt, Artificial Sequence
  Synthetic
ucaaaagaaagauuugcagagag

SEQ ID NO: 2748 - RNA, 24 nt, Artificial Sequence
  Synthetic
cucaaaagaaagauuugcagagag

SEQ ID NO: 2749 - RNA, 18 nt, Artificial Sequence
  Synthetic
uguuaguuagcuucugag

SEQ ID NO: 2750 - RNA, 19 nt, Artificial Sequence
  Synthetic
cuguuaguuagcuucugag

SEQ ID NO: 2751 - RNA, 20 nt, Artificial Sequence
  Synthetic
ccuguuaguuagcuucugag

SEQ ID NO: 2752 - RNA, 18 nt, Artificial Sequence
  Synthetic
cuaacagauucuguguag

SEQ ID NO: 2753 - RNA, 19 nt, Artificial Sequence
  Synthetic
ucuaacagauucuguguag

SEQ ID NO: 2754 - RNA, 20 nt, Artificial Sequence
  Synthetic
uucuaacagauucuguguag

SEQ ID NO: 2755 - RNA, 18 nt, Artificial Sequence
  Synthetic
ugggauaggggauacggg

SEQ ID NO: 2756 - RNA, 19 nt, Artificial Sequence
  Synthetic
gugggauaggggauacggg

SEQ ID NO: 2757 - RNA, 20 nt, Artificial Sequence
  Synthetic
ggugggauaggggauacggg

SEQ ID NO: 2758 - RNA, 18 nt, Artificial Sequence
  Synthetic
ucuguguggggguugggg

SEQ ID NO: 2759 - RNA, 19 nt, Artificial Sequence
  Synthetic
aucuguguggggguugggg

SEQ ID NO: 2760 - RNA, 20 nt, Artificial Sequence
  Synthetic
caucuguguggggguugggg

SEQ ID NO: 2761 - RNA, 21 nt, Artificial Sequence
  Synthetic
gcaucuguguggggguugggg

SEQ ID NO: 2762 - RNA, 22 nt, Artificial Sequence
  Synthetic
agcaucuguguggggguugggg

SEQ ID NO: 2763 - RNA, 23 nt, Artificial Sequence
  Synthetic
gagcaucuguguggggguugggg

SEQ ID NO: 2764 - RNA, 24 nt, Artificial Sequence
  Synthetic
ugagcaucuguguggggguugggg

SEQ ID NO: 2765 - RNA, 18 nt, Artificial Sequence
  Synthetic
gagcaucugugugggggu

SEQ ID NO: 2766 - RNA, 19 nt, Artificial Sequence
  Synthetic
ugagcaucugugugggggu

SEQ ID NO: 2767 - RNA, 20 nt, Artificial Sequence
  Synthetic
gugagcaucugugugggggu

SEQ ID NO: 2768 - RNA, 18 nt, Artificial Sequence
  Synthetic
gguggugagcaucugugu

SEQ ID NO: 2769 - RNA, 19 nt, Artificial Sequence
  Synthetic
ggguggugagcaucugugu

SEQ ID NO: 2770 - RNA, 20 nt, Artificial Sequence
  Synthetic
uggguggugagcaucugugu

SEQ ID NO: 2771 - RNA, 18 nt, Artificial Sequence
  Synthetic
aagauacaaaacaugauu

SEQ ID NO: 2772 - RNA, 19 nt, Artificial Sequence
  Synthetic
aaagauacaaaacaugauu

SEQ ID NO: 2773 - RNA, 20 nt, Artificial Sequence
  Synthetic
caaagauacaaaacaugauu

SEQ ID NO: 2774 - RNA, 18 nt, Artificial Sequence
  Synthetic
ucuccagugagaugccuu

SEQ ID NO: 2775 - RNA, 19 nt, Artificial Sequence
  Synthetic
cucuccagugagaugccuu

SEQ ID NO: 2776 - RNA, 20 nt, Artificial Sequence
  Synthetic
ccucuccagugagaugccuu

SEQ ID NO: 2777 - RNA, 18 nt, Artificial Sequence
  Synthetic
aaggaaagggucacaguu

SEQ ID NO: 2778 - RNA, 19 nt, Artificial Sequence
  Synthetic
uaaggaaagggucacaguu

SEQ ID NO: 2779 - RNA, 20 nt, Artificial Sequence
  Synthetic
auaaggaaagggucacaguu

SEQ ID NO: 2780 - RNA, 21 nt, Artificial Sequence
  Synthetic
gauaaggaaagggucacaguu

SEQ ID NO: 2781 - RNA, 22 nt, Artificial Sequence
  Synthetic
agauaaggaaagggucacaguu

SEQ ID NO: 2782 - RNA, 23 nt, Artificial Sequence
  Synthetic
aagauaaggaaagggucacaguu

SEQ ID NO: 2783 - RNA, 24 nt, Artificial Sequence
  Synthetic
uaagauaaggaaagggucacaguu

SEQ ID NO: 2784 - RNA, 18 nt, Artificial Sequence
  Synthetic
aagcccacauuuuaguaa

SEQ ID NO: 2785 - RNA, 19 nt, Artificial Sequence
  Synthetic
aaagcccacauuuuaguaa

SEQ ID NO: 2786 - RNA, 20 nt, Artificial Sequence
  Synthetic
aaaagcccacauuuuaguaa

SEQ ID NO: 2787 - RNA, 21 nt, Artificial Sequence
  Synthetic
caaaagcccacauuuuaguaa

SEQ ID NO: 2788 - RNA, 22 nt, Artificial Sequence
  Synthetic
ucaaaagcccacauuuuaguaa

SEQ ID NO: 2789 - RNA, 23 nt, Artificial Sequence
  Synthetic
gucaaaagcccacauuuuaguaa

SEQ ID NO: 2790 - RNA, 24 nt, Artificial Sequence
  Synthetic
agucaaaagcccacauuuuaguaa

SEQ ID NO: 2791 - RNA, 18 nt, Artificial Sequence
  Synthetic
ugaaggcgaaaagaauca

SEQ ID NO: 2792 - RNA, 19 nt, Artificial Sequence
  Synthetic
uugaaggcgaaaagaauca

SEQ ID NO: 2793 - RNA, 20 nt, Artificial Sequence
  Synthetic
auugaaggcgaaaagaauca

SEQ ID NO: 2794 - RNA, 21 nt, Artificial Sequence
  Synthetic
uauugaaggcgaaaagaauca

SEQ ID NO: 2795 - RNA, 22 nt, Artificial Sequence
  Synthetic
guauugaaggcgaaaagaauca

SEQ ID NO: 2796 - RNA, 23 nt, Artificial Sequence
  Synthetic
uguauugaaggcgaaaagaauca

SEQ ID NO: 2797 - RNA, 24 nt, Artificial Sequence
  Synthetic
guguauugaaggcgaaaagaauca

SEQ ID NO: 2798 - RNA, 18 nt, Artificial Sequence
  Synthetic
augauuuguacaagauca

SEQ ID NO: 2799 - RNA, 19 nt, Artificial Sequence
  Synthetic
aaugauuuguacaagauca

SEQ ID NO: 2800 - RNA, 20 nt, Artificial Sequence
  Synthetic
aaaugauuuguacaagauca

SEQ ID NO: 2801 - RNA, 21 nt, Artificial Sequence
  Synthetic
caaaugauuuguacaagauca

SEQ ID NO: 2802 - RNA, 22 nt, Artificial Sequence
  Synthetic
gcaaaugauuuguacaagauca

SEQ ID NO: 2803 - RNA, 23 nt, Artificial Sequence
  Synthetic
agcaaaugauuuguacaagauca

SEQ ID NO: 2804 - RNA, 24 nt, Artificial Sequence
  Synthetic
aagcaaaugauuuguacaagauca

SEQ ID NO: 2805 - RNA, 18 nt, Artificial Sequence
  Synthetic
uauucagaaggcaucuca

SEQ ID NO: 2806 - RNA, 19 nt, Artificial Sequence
  Synthetic
auauucagaaggcaucuca

SEQ ID NO: 2807 - RNA, 20 nt, Artificial Sequence
  Synthetic
cauauucagaaggcaucuca

SEQ ID NO: 2808 - RNA, 18 nt, Artificial Sequence
  Synthetic
accaacuuuaaauguaga

SEQ ID NO: 2809 - RNA, 19 nt, Artificial Sequence
  Synthetic
aaccaacuuuaaauguaga

SEQ ID NO: 2810 - RNA, 20 nt, Artificial Sequence
  Synthetic
aaaccaacuuuaaauguaga

SEQ ID NO: 2811 - RNA, 21 nt, Artificial Sequence
  Synthetic
uaaaccaacuuuaaauguaga

SEQ ID NO: 2812 - RNA, 22 nt, Artificial Sequence
  Synthetic
uuaaaccaacuuuaaauguaga

SEQ ID NO: 2813 - RNA, 23 nt, Artificial Sequence
  Synthetic
cuuaaaccaacuuuaaauguaga

SEQ ID NO: 2814 - RNA, 24 nt, Artificial Sequence
  Synthetic
acuuaaaccaacuuuaaauguaga

SEQ ID NO: 2815 - RNA, 18 nt, Artificial Sequence
  Synthetic
aaaugcuguuucuuuuga

SEQ ID NO: 2816 - RNA, 19 nt, Artificial Sequence
  Synthetic
gaaaugcuguuucuuuuga

SEQ ID NO: 2817 - RNA, 20 nt, Artificial Sequence
  Synthetic
ggaaaugcuguuucuuuuga

SEQ ID NO: 2818 - RNA, 21 nt, Artificial Sequence
  Synthetic
aggaaaugcuguuucuuuuga

SEQ ID NO: 2819 - RNA, 22 nt, Artificial Sequence
  Synthetic
uaggaaaugcuguuucuuuuga

SEQ ID NO: 2820 - RNA, 23 nt, Artificial Sequence
  Synthetic
guaggaaaugcuguuucuuuuga

SEQ ID NO: 2821 - RNA, 24 nt, Artificial Sequence
  Synthetic
aguaggaaaugcuguuucuuuuga

SEQ ID NO: 2822 - RNA, 18 nt, Artificial Sequence
  Synthetic
aaaccaacuuuaaaugua

SEQ ID NO: 2823 - RNA, 19 nt, Artificial Sequence
  Synthetic
uaaaccaacuuuaaaugua

SEQ ID NO: 2824 - RNA, 20 nt, Artificial Sequence
  Synthetic
uuaaaccaacuuuaaaugua

SEQ ID NO: 2825 - RNA, 21 nt, Artificial Sequence
  Synthetic
cuuaaaccaacuuuaaaugua

SEQ ID NO: 2826 - RNA, 22 nt, Artificial Sequence
  Synthetic
acuuaaaccaacuuuaaaugua

SEQ ID NO: 2827 - RNA, 23 nt, Artificial Sequence
  Synthetic
aacuuaaaccaacuuuaaaugua

SEQ ID NO: 2828 - RNA, 24 nt, Artificial Sequence
  Synthetic
caacuuaaaccaacuuuaaaugua

SEQ ID NO: 2829 - RNA, 18 nt, Artificial Sequence
  Synthetic
guuaaaucauuaagugua

SEQ ID NO: 2830 - RNA, 19 nt, Artificial Sequence
  Synthetic
aguuaaaucauuaagugua

SEQ ID NO: 2831 - RNA, 20 nt, Artificial Sequence
  Synthetic
gaguuaaaucauuaagugua

SEQ ID NO: 2832 - RNA, 21 nt, Artificial Sequence
  Synthetic
ggaguuaaaucauuaagugua

SEQ ID NO: 2833 - RNA, 22 nt, Artificial Sequence
  Synthetic
uggaguuaaaucauuaagugua

SEQ ID NO: 2834 - RNA, 23 nt, Artificial Sequence
  Synthetic
guggaguuaaaucauuaagugua

SEQ ID NO: 2835 - RNA, 24 nt, Artificial Sequence
  Synthetic
gguggaguuaaaucauuaagugua

SEQ ID NO: 2836 - RNA, 18 nt, Artificial Sequence
  Synthetic
cggggagaguuucuugua

SEQ ID NO: 2837 - RNA, 19 nt, Artificial Sequence
  Synthetic
ccggggagaguuucuugua

SEQ ID NO: 2838 - RNA, 20 nt, Artificial Sequence
  Synthetic
accggggagaguuucuugua

SEQ ID NO: 2839 - RNA, 21 nt, Artificial Sequence
  Synthetic
uaccggggagaguuucuugua

SEQ ID NO: 2840 - RNA, 22 nt, Artificial Sequence
  Synthetic
uuaccggggagaguuucuugua

SEQ ID NO: 2841 - RNA, 23 nt, Artificial Sequence
  Synthetic
cuuaccggggagaguuucuugua

SEQ ID NO: 2842 - RNA, 24 nt, Artificial Sequence
  Synthetic
acuuaccggggagaguuucuugua

SEQ ID NO: 2843 - RNA, 18 nt, Artificial Sequence
  Synthetic
cagcugagagguuacuua

SEQ ID NO: 2844 - RNA, 19 nt, Artificial Sequence
  Synthetic
gcagcugagagguuacuua

SEQ ID NO: 2845 - RNA, 20 nt, Artificial Sequence
  Synthetic
agcagcugagagguuacuua

SEQ ID NO: 2846 - RNA, 21 nt, Artificial Sequence
  Synthetic
aagcagcugagagguuacuua

SEQ ID NO: 2847 - RNA, 22 nt, Artificial Sequence
  Synthetic
caagcagcugagagguuacuua

SEQ ID NO: 2848 - RNA, 23 nt, Artificial Sequence
  Synthetic
ccaagcagcugagagguuacuua

SEQ ID NO: 2849 - RNA, 24 nt, Artificial Sequence
  Synthetic
gccaagcagcugagagguuacuua

SEQ ID NO: 2850 - RNA, 18 nt, Artificial Sequence
  Synthetic
auucagaaggcaucucac

SEQ ID NO: 2851 - RNA, 19 nt, Artificial Sequence
  Synthetic
uauucagaaggcaucucac

SEQ ID NO: 2852 - RNA, 20 nt, Artificial Sequence
  Synthetic
auauucagaaggcaucucac

SEQ ID NO: 2853 - RNA, 18 nt, Artificial Sequence
  Synthetic
agcugagagguuacuuac

SEQ ID NO: 2854 - RNA, 19 nt, Artificial Sequence
  Synthetic
cagcugagagguuacuuac

SEQ ID NO: 2855 - RNA, 20 nt, Artificial Sequence
  Synthetic
gcagcugagagguuacuuac

SEQ ID NO: 2856 - RNA, 21 nt, Artificial Sequence
  Synthetic
agcagcugagagguuacuuac

SEQ ID NO: 2857 - RNA, 22 nt, Artificial Sequence
  Synthetic
aagcagcugagagguuacuuac

SEQ ID NO: 2858 - RNA, 23 nt, Artificial Sequence
  Synthetic
caagcagcugagagguuacuuac

SEQ ID NO: 2859 - RNA, 24 nt, Artificial Sequence
  Synthetic
ccaagcagcugagagguuacuuac

SEQ ID NO: 2860 - RNA, 18 nt, Artificial Sequence
  Synthetic
gcugagagguuacuuacc

SEQ ID NO: 2861 - RNA, 19 nt, Artificial Sequence
  Synthetic
agcugagagguuacuuacc

SEQ ID NO: 2862 - RNA, 20 nt, Artificial Sequence
  Synthetic
cagcugagagguuacuuacc

SEQ ID NO: 2863 - RNA, 21 nt, Artificial Sequence
  Synthetic
gcagcugagagguuacuuacc

SEQ ID NO: 2864 - RNA, 22 nt, Artificial Sequence
  Synthetic
agcagcugagagguuacuuacc

SEQ ID NO: 2865 - RNA, 23 nt, Artificial Sequence
  Synthetic
aagcagcugagagguuacuuacc

SEQ ID NO: 2866 - RNA, 24 nt, Artificial Sequence
  Synthetic
caagcagcugagagguuacuuacc

SEQ ID NO: 2867 - RNA, 18 nt, Artificial Sequence
  Synthetic
uaaaagaaauuacuaucc

SEQ ID NO: 2868 - RNA, 19 nt, Artificial Sequence
  Synthetic
guaaaagaaauuacuaucc

SEQ ID NO: 2869 - RNA, 20 nt, Artificial Sequence
  Synthetic
aguaaaagaaauuacuaucc

SEQ ID NO: 2870 - RNA, 21 nt, Artificial Sequence
  Synthetic
uaguaaaagaaauuacuaucc

SEQ ID NO: 2871 - RNA, 22 nt, Artificial Sequence
  Synthetic
uuaguaaaagaaauuacuaucc

SEQ ID NO: 2872 - RNA, 23 nt, Artificial Sequence
  Synthetic
uuuaguaaaagaaauuacuaucc

SEQ ID NO: 2873 - RNA, 24 nt, Artificial Sequence
  Synthetic
uuuuaguaaaagaaauuacuaucc

SEQ ID NO: 2874 - RNA, 18 nt, Artificial Sequence
  Synthetic
guugagcuuaaaauaagc

SEQ ID NO: 2875 - RNA, 19 nt, Artificial Sequence
  Synthetic
aguugagcuuaaaauaagc

SEQ ID NO: 2876 - RNA, 20 nt, Artificial Sequence
  Synthetic
aaguugagcuuaaaauaagc

SEQ ID NO: 2877 - RNA, 21 nt, Artificial Sequence
  Synthetic
uaaguugagcuuaaaauaagc

SEQ ID NO: 2878 - RNA, 22 nt, Artificial Sequence
  Synthetic
uuaaguugagcuuaaaauaagc

SEQ ID NO: 2879 - RNA, 23 nt, Artificial Sequence
  Synthetic
uuuaaguugagcuuaaaauaagc

SEQ ID NO: 2880 - RNA, 24 nt, Artificial Sequence
  Synthetic
uuuuaaguugagcuuaaaauaagc

SEQ ID NO: 2881 - RNA, 18 nt, Artificial Sequence
  Synthetic
aauaaaggauaucagagc

SEQ ID NO: 2882 - RNA, 19 nt, Artificial Sequence
  Synthetic
gaauaaaggauaucagagc

SEQ ID NO: 2883 - RNA, 20 nt, Artificial Sequence
  Synthetic
agaauaaaggauaucagagc

SEQ ID NO: 2884 - RNA, 21 nt, Artificial Sequence
  Synthetic
aagaauaaaggauaucagagc

SEQ ID NO: 2885 - RNA, 22 nt, Artificial Sequence
  Synthetic
aaagaauaaaggauaucagagc

SEQ ID NO: 2886 - RNA, 23 nt, Artificial Sequence
  Synthetic
uaaagaauaaaggauaucagagc

SEQ ID NO: 2887 - RNA, 24 nt, Artificial Sequence
  Synthetic
auaaagaauaaaggauaucagagc

SEQ ID NO: 2888 - RNA, 18 nt, Artificial Sequence
  Synthetic
uaaauguagagggggauc

SEQ ID NO: 2889 - RNA, 19 nt, Artificial Sequence
  Synthetic
uuaaauguagagggggauc

SEQ ID NO: 2890 - RNA, 20 nt, Artificial Sequence
  Synthetic
uuuaaauguagagggggauc

SEQ ID NO: 2891 - RNA, 21 nt, Artificial Sequence
  Synthetic
cuuuaaauguagagggggauc

SEQ ID NO: 2892 - RNA, 22 nt, Artificial Sequence
  Synthetic
acuuuaaauguagagggggauc

SEQ ID NO: 2893 - RNA, 23 nt, Artificial Sequence
  Synthetic
aacuuuaaauguagagggggauc

SEQ ID NO: 2894 - RNA, 24 nt, Artificial Sequence
  Synthetic
caacuuuaaauguagagggggauc

SEQ ID NO: 2895 - RNA, 18 nt, Artificial Sequence
  Synthetic
auauagacaguauaaaag

SEQ ID NO: 2896 - RNA, 19 nt, Artificial Sequence
  Synthetic
cauauagacaguauaaaag

SEQ ID NO: 2897 - RNA, 20 nt, Artificial Sequence
  Synthetic
ucauauagacaguauaaaag

SEQ ID NO: 2898 - RNA, 21 nt, Artificial Sequence
  Synthetic
aucauauagacaguauaaaag

SEQ ID NO: 2899 - RNA, 22 nt, Artificial Sequence
  Synthetic
aaucauauagacaguauaaaag

SEQ ID NO: 2900 - RNA, 23 nt, Artificial Sequence
  Synthetic
caaucauauagacaguauaaaag

SEQ ID NO: 2901 - RNA, 24 nt, Artificial Sequence
  Synthetic
ucaaucauauagacaguauaaaag

SEQ ID NO: 2902 - RNA, 18 nt, Artificial Sequence
  Synthetic
ucauuaaguguauugaag

SEQ ID NO: 2903 - RNA, 19 nt, Artificial Sequence
  Synthetic
aucauuaaguguauugaag

SEQ ID NO: 2904 - RNA, 20 nt, Artificial Sequence
  Synthetic
aaucauuaaguguauugaag

SEQ ID NO: 2905 - RNA, 21 nt, Artificial Sequence
  Synthetic
aaaucauuaaguguauugaag

SEQ ID NO: 2906 - RNA, 22 nt, Artificial Sequence
  Synthetic
uaaaucauuaaguguauugaag

SEQ ID NO: 2907 - RNA, 23 nt, Artificial Sequence
  Synthetic
uuaaaucauuaaguguauugaag

SEQ ID NO: 2908 - RNA, 24 nt, Artificial Sequence
  Synthetic
guuaaaucauuaaguguauugaag

SEQ ID NO: 2909 - RNA, 18 nt, Artificial Sequence
  Synthetic
acaguucuucuuuuuaag

SEQ ID NO: 2910 - RNA, 19 nt, Artificial Sequence
  Synthetic
aacaguucuucuuuuuaag

SEQ ID NO: 2911 - RNA, 20 nt, Artificial Sequence
  Synthetic
gaacaguucuucuuuuuaag

SEQ ID NO: 2912 - RNA, 21 nt, Artificial Sequence
  Synthetic
agaacaguucuucuuuuuaag

SEQ ID NO: 2913 - RNA, 22 nt, Artificial Sequence
  Synthetic
gagaacaguucuucuuuuuaag

SEQ ID NO: 2914 - RNA, 23 nt, Artificial Sequence
  Synthetic
agagaacaguucuucuuuuuaag

SEQ ID NO: 2915 - RNA, 24 nt, Artificial Sequence
  Synthetic
cagagaacaguucuucuuuuuaag

SEQ ID NO: 2916 - RNA, 18 nt, Artificial Sequence
  Synthetic
cucagcucuucuggccag

SEQ ID NO: 2917 - RNA, 19 nt, Artificial Sequence
  Synthetic
ucucagcucuucuggccag

SEQ ID NO: 2918 - RNA, 20 nt, Artificial Sequence
  Synthetic
gucucagcucuucuggccag

SEQ ID NO: 2919 - RNA, 21 nt, Artificial Sequence
  Synthetic
ugucucagcucuucuggccag

SEQ ID NO: 2920 - RNA, 22 nt, Artificial Sequence
  Synthetic
augucucagcucuucuggccag

SEQ ID NO: 2921 - RNA, 23 nt, Artificial Sequence
  Synthetic
gaugucucagcucuucuggccag

SEQ ID NO: 2922 - RNA, 24 nt, Artificial Sequence
  Synthetic
ggaugucucagcucuucuggccag

SEQ ID NO: 2923 - RNA, 18 nt, Artificial Sequence
  Synthetic
aacuaacaggccaagcag

SEQ ID NO: 2924 - RNA, 19 nt, Artificial Sequence
  Synthetic
uaacuaacaggccaagcag

SEQ ID NO: 2925 - RNA, 20 nt, Artificial Sequence
  Synthetic
cuaacuaacaggccaagcag

SEQ ID NO: 2926 - RNA, 21 nt, Artificial Sequence
  Synthetic
gcuaacuaacaggccaagcag

SEQ ID NO: 2927 - RNA, 22 nt, Artificial Sequence
  Synthetic
agcuaacuaacaggccaagcag

SEQ ID NO: 2928 - RNA, 23 nt, Artificial Sequence
  Synthetic
aagcuaacuaacaggccaagcag

SEQ ID NO: 2929 - RNA, 24 nt, Artificial Sequence
  Synthetic
gaagcuaacuaacaggccaagcag

SEQ ID NO: 2930 - RNA, 18 nt, Artificial Sequence
  Synthetic
aaaggauaucagagcuag

SEQ ID NO: 2931 - RNA, 19 nt, Artificial Sequence
  Synthetic
uaaaggauaucagagcuag

SEQ ID NO: 2932 - RNA, 20 nt, Artificial Sequence
  Synthetic
auaaaggauaucagagcuag

SEQ ID NO: 2933 - RNA, 21 nt, Artificial Sequence
  Synthetic
aauaaaggauaucagagcuag

SEQ ID NO: 2934 - RNA, 22 nt, Artificial Sequence
  Synthetic
gaauaaaggauaucagagcuag

SEQ ID NO: 2935 - RNA, 23 nt, Artificial Sequence
  Synthetic
agaauaaaggauaucagagcuag

SEQ ID NO: 2936 - RNA, 24 nt, Artificial Sequence
  Synthetic
aagaauaaaggauaucagagcuag

SEQ ID NO: 2937 - RNA, 18 nt, Artificial Sequence
  Synthetic
aaccaacuuuaaauguag

SEQ ID NO: 2938 - RNA, 19 nt, Artificial Sequence
  Synthetic
aaaccaacuuuaaauguag

SEQ ID NO: 2939 - RNA, 20 nt, Artificial Sequence
  Synthetic
uaaaccaacuuuaaauguag

SEQ ID NO: 2940 - RNA, 21 nt, Artificial Sequence
  Synthetic
uuaaaccaacuuuaaauguag

SEQ ID NO: 2941 - RNA, 22 nt, Artificial Sequence
  Synthetic
cuuaaaccaacuuuaaauguag

SEQ ID NO: 2942 - RNA, 23 nt, Artificial Sequence
  Synthetic
acuuaaaccaacuuuaaauguag

SEQ ID NO: 2943 - RNA, 24 nt, Artificial Sequence
  Synthetic
aacuuaaaccaacuuuaaauguag

SEQ ID NO: 2944 - RNA, 18 nt, Artificial Sequence
  Synthetic
ggggagaguuucuuguag

SEQ ID NO: 2945 - RNA, 19 nt, Artificial Sequence
  Synthetic
cggggagaguuucuuguag

SEQ ID NO: 2946 - RNA, 20 nt, Artificial Sequence
  Synthetic
ccggggagaguuucuuguag

SEQ ID NO: 2947 - RNA, 21 nt, Artificial Sequence
  Synthetic
accggggagaguuucuuguag

SEQ ID NO: 2948 - RNA, 22 nt, Artificial Sequence
  Synthetic
uaccggggagaguuucuuguag

SEQ ID NO: 2949 - RNA, 23 nt, Artificial Sequence
  Synthetic
uuaccggggagaguuucuuguag

SEQ ID NO: 2950 - RNA, 24 nt, Artificial Sequence
  Synthetic
cuuaccggggagaguuucuuguag

SEQ ID NO: 2951 - RNA, 18 nt, Artificial Sequence
  Synthetic
ggguuuaguucuccuuag

SEQ ID NO: 2952 - RNA, 19 nt, Artificial Sequence
  Synthetic
aggguuuaguucuccuuag

SEQ ID NO: 2953 - RNA, 20 nt, Artificial Sequence
  Synthetic
gaggguuuaguucuccuuag

SEQ ID NO: 2954 - RNA, 21 nt, Artificial Sequence
  Synthetic
agaggguuuaguucuccuuag

SEQ ID NO: 2955 - RNA, 22 nt, Artificial Sequence
  Synthetic
gagaggguuuaguucuccuuag

SEQ ID NO: 2956 - RNA, 23 nt, Artificial Sequence
  Synthetic
ggagaggguuuaguucuccuuag

SEQ ID NO: 2957 - RNA, 24 nt, Artificial Sequence
  Synthetic
uggagaggguuuaguucuccuuag

SEQ ID NO: 2958 - RNA, 18 nt, Artificial Sequence
  Synthetic
cugagagguuacuuaccg

SEQ ID NO: 2959 - RNA, 19 nt, Artificial Sequence
  Synthetic
gcugagagguuacuuaccg

SEQ ID NO: 2960 - RNA, 20 nt, Artificial Sequence
  Synthetic
agcugagagguuacuuaccg

SEQ ID NO: 2961 - RNA, 21 nt, Artificial Sequence
  Synthetic
cagcugagagguuacuuaccg

SEQ ID NO: 2962 - RNA, 22 nt, Artificial Sequence
  Synthetic
gcagcugagagguuacuuaccg

SEQ ID NO: 2963 - RNA, 23 nt, Artificial Sequence
  Synthetic
agcagcugagagguuacuuaccg

SEQ ID NO: 2964 - RNA, 24 nt, Artificial Sequence
  Synthetic
aagcagcugagagguuacuuaccg

SEQ ID NO: 2965 - RNA, 18 nt, Artificial Sequence
  Synthetic
uguuucuuuugaaggagg

SEQ ID NO: 2966 - RNA, 19 nt, Artificial Sequence
  Synthetic
cuguuucuuuugaaggagg

SEQ ID NO: 2967 - RNA, 20 nt, Artificial Sequence
  Synthetic
gcuguuucuuuugaaggagg

SEQ ID NO: 2968 - RNA, 21 nt, Artificial Sequence
  Synthetic
ugcuguuucuuuugaaggagg

SEQ ID NO: 2969 - RNA, 22 nt, Artificial Sequence
  Synthetic
augcuguuucuuuugaaggagg

SEQ ID NO: 2970 - RNA, 23 nt, Artificial Sequence
  Synthetic
aaugcuguuucuuuugaaggagg

SEQ ID NO: 2971 - RNA, 24 nt, Artificial Sequence
  Synthetic
aaaugcuguuucuuuugaaggagg

SEQ ID NO: 2972 - RNA, 18 nt, Artificial Sequence
  Synthetic
uuaaaccaacuuuaaaug

SEQ ID NO: 2973 - RNA, 19 nt, Artificial Sequence
  Synthetic
cuuaaaccaacuuuaaaug

SEQ ID NO: 2974 - RNA, 20 nt, Artificial Sequence
  Synthetic
acuuaaaccaacuuuaaaug

SEQ ID NO: 2975 - RNA, 21 nt, Artificial Sequence
  Synthetic
aacuuaaaccaacuuuaaaug

SEQ ID NO: 2976 - RNA, 22 nt, Artificial Sequence
  Synthetic
caacuuaaaccaacuuuaaaug

SEQ ID NO: 2977 - RNA, 23 nt, Artificial Sequence
  Synthetic
ccaacuuaaaccaacuuuaaaug

SEQ ID NO: 2978 - RNA, 24 nt, Artificial Sequence
  Synthetic
gccaacuuaaaccaacuuuaaaug

SEQ ID NO: 2979 - RNA, 18 nt, Artificial Sequence
  Synthetic
ucagaaggcaucucacug

SEQ ID NO: 2980 - RNA, 19 nt, Artificial Sequence
  Synthetic
uucagaaggcaucucacug

SEQ ID NO: 2981 - RNA, 20 nt, Artificial Sequence
  Synthetic
auucagaaggcaucucacug

SEQ ID NO: 2982 - RNA, 21 nt, Artificial Sequence
  Synthetic
uauucagaaggcaucucacug

SEQ ID NO: 2983 - RNA, 22 nt, Artificial Sequence
  Synthetic
auauucagaaggcaucucacug

SEQ ID NO: 2984 - RNA, 23 nt, Artificial Sequence
  Synthetic
cauauucagaaggcaucucacug

SEQ ID NO: 2985 - RNA, 24 nt, Artificial Sequence
  Synthetic
acauauucagaaggcaucucacug

SEQ ID NO: 2986 - RNA, 18 nt, Artificial Sequence
  Synthetic
accggggagaguuucuug

SEQ ID NO: 2987 - RNA, 19 nt, Artificial Sequence
  Synthetic
uaccggggagaguuucuug

SEQ ID NO: 2988 - RNA, 20 nt, Artificial Sequence
  Synthetic
uuaccggggagaguuucuug

SEQ ID NO: 2989 - RNA, 21 nt, Artificial Sequence
  Synthetic
cuuaccggggagaguuucuug

SEQ ID NO: 2990 - RNA, 22 nt, Artificial Sequence
  Synthetic
acuuaccggggagaguuucuug

SEQ ID NO: 2991 - RNA, 23 nt, Artificial Sequence
  Synthetic
uacuuaccggggagaguuucuug

SEQ ID NO: 2992 - RNA, 24 nt, Artificial Sequence
  Synthetic
uuacuuaccggggagaguuucuug

SEQ ID NO: 2993 - RNA, 18 nt, Artificial Sequence
  Synthetic
gaaaugcuguuucuuuug

SEQ ID NO: 2994 - RNA, 19 nt, Artificial Sequence
  Synthetic
ggaaaugcuguuucuuuug

SEQ ID NO: 2995 - RNA, 20 nt, Artificial Sequence
  Synthetic
aggaaaugcuguuucuuuug

SEQ ID NO: 2996 - RNA, 21 nt, Artificial Sequence
  Synthetic
uaggaaaugcuguuucuuuug

SEQ ID NO: 2997 - RNA, 22 nt, Artificial Sequence
  Synthetic
guaggaaaugcuguuucuuuug

SEQ ID NO: 2998 - RNA, 23 nt, Artificial Sequence
  Synthetic
aguaggaaaugcuguuucuuuug

SEQ ID NO: 2999 - RNA, 24 nt, Artificial Sequence
  Synthetic
aaguaggaaaugcuguuucuuuug

SEQ ID NO: 3000 - RNA, 18 nt, Artificial Sequence
  Synthetic
auugaaggcgaaaagaau

SEQ ID NO: 3001 - RNA, 19 nt, Artificial Sequence
  Synthetic
uauugaaggcgaaaagaau

SEQ ID NO: 3002 - RNA, 20 nt, Artificial Sequence
  Synthetic
guauugaaggcgaaaagaau

SEQ ID NO: 3003 - RNA, 21 nt, Artificial Sequence
  Synthetic
uguauugaaggcgaaaagaau

SEQ ID NO: 3004 - RNA, 22 nt, Artificial Sequence
  Synthetic
guguauugaaggcgaaaagaau

SEQ ID NO: 3005 - RNA, 23 nt, Artificial Sequence
  Synthetic
aguguauugaaggcgaaaagaau

SEQ ID NO: 3006 - RNA, 24 nt, Artificial Sequence
  Synthetic
aaguguauugaaggcgaaaagaau

SEQ ID NO: 3007 - RNA, 18 nt, Artificial Sequence
  Synthetic
auaaagaauaaaggauau

SEQ ID NO: 3008 - RNA, 19 nt, Artificial Sequence
  Synthetic
uauaaagaauaaaggauau

SEQ ID NO: 3009 - RNA, 20 nt, Artificial Sequence
  Synthetic
auauaaagaauaaaggauau

SEQ ID NO: 3010 - RNA, 21 nt, Artificial Sequence
  Synthetic
aauauaaagaauaaaggauau

SEQ ID NO: 3011 - RNA, 22 nt, Artificial Sequence
  Synthetic
aaauauaaagaauaaaggauau

SEQ ID NO: 3012 - RNA, 23 nt, Artificial Sequence
  Synthetic
aaaauauaaagaauaaaggauau

SEQ ID NO: 3013 - RNA, 24 nt, Artificial Sequence
  Synthetic
gaaaauauaaagaauaaaggauau

SEQ ID NO: 3014 - RNA, 18 nt, Artificial Sequence
  Synthetic
cuaacaggccaagcagcu

SEQ ID NO: 3015 - RNA, 19 nt, Artificial Sequence
  Synthetic
acuaacaggccaagcagcu

SEQ ID NO: 3016 - RNA, 20 nt, Artificial Sequence
  Synthetic
aacuaacaggccaagcagcu

SEQ ID NO: 3017 - RNA, 21 nt, Artificial Sequence
  Synthetic
uaacuaacaggccaagcagcu

SEQ ID NO: 3018 - RNA, 22 nt, Artificial Sequence
  Synthetic
cuaacuaacaggccaagcagcu

SEQ ID NO: 3019 - RNA, 23 nt, Artificial Sequence
  Synthetic
gcuaacuaacaggccaagcagcu

SEQ ID NO: 3020 - RNA, 24 nt, Artificial Sequence
  Synthetic
agcuaacuaacaggccaagcagcu

SEQ ID NO: 3021 - RNA, 18 nt, Artificial Sequence
  Synthetic
aaagucuuuuacucaucu

SEQ ID NO: 3022 - RNA, 19 nt, Artificial Sequence
  Synthetic
uaaagucuuuuacucaucu

SEQ ID NO: 3023 - RNA, 20 nt, Artificial Sequence
  Synthetic
guaaagucuuuuacucaucu

SEQ ID NO: 3024 - RNA, 21 nt, Artificial Sequence
  Synthetic
uguaaagucuuuuacucaucu

SEQ ID NO: 3025 - RNA, 22 nt, Artificial Sequence
  Synthetic
cuguaaagucuuuuacucaucu

SEQ ID NO: 3026 - RNA, 23 nt, Artificial Sequence
  Synthetic
ccuguaaagucuuuuacucaucu

SEQ ID NO: 3027 - RNA, 24 nt, Artificial Sequence
  Synthetic
uccuguaaagucuuuuacucaucu

SEQ ID NO: 3028 - RNA, 18 nt, Artificial Sequence
  Synthetic
uauagacaguauaaaagu

SEQ ID NO: 3029 - RNA, 19 nt, Artificial Sequence
  Synthetic
auauagacaguauaaaagu

SEQ ID NO: 3030 - RNA, 20 nt, Artificial Sequence
  Synthetic
cauauagacaguauaaaagu

SEQ ID NO: 3031 - RNA, 21 nt, Artificial Sequence
  Synthetic
ucauauagacaguauaaaagu

SEQ ID NO: 3032 - RNA, 22 nt, Artificial Sequence
  Synthetic
aucauauagacaguauaaaagu

SEQ ID NO: 3033 - RNA, 23 nt, Artificial Sequence
  Synthetic
aaucauauagacaguauaaaagu

SEQ ID NO: 3034 - RNA, 24 nt, Artificial Sequence
  Synthetic
caaucauauagacaguauaaaagu

SEQ ID NO: 3035 - RNA, 18 nt, Artificial Sequence
  Synthetic
cuuugauguuauaaccgu

SEQ ID NO: 3036 - RNA, 19 nt, Artificial Sequence
  Synthetic
ucuuugauguuauaaccgu

SEQ ID NO: 3037 - RNA, 20 nt, Artificial Sequence
  Synthetic
aucuuugauguuauaaccgu

SEQ ID NO: 3038 - RNA, 21 nt, Artificial Sequence
  Synthetic
uaucuuugauguuauaaccgu

SEQ ID NO: 3039 - RNA, 22 nt, Artificial Sequence
  Synthetic
guaucuuugauguuauaaccgu

SEQ ID NO: 3040 - RNA, 23 nt, Artificial Sequence
  Synthetic
uguaucuuugauguuauaaccgu

SEQ ID NO: 3041 - RNA, 24 nt, Artificial Sequence
  Synthetic
uuguaucuuugauguuauaaccgu

SEQ ID NO: 3042 - RNA, 18 nt, Artificial Sequence
  Synthetic
agagaauagaucucuggu

SEQ ID NO: 3043 - RNA, 19 nt, Artificial Sequence
  Synthetic
uagagaauagaucucuggu

SEQ ID NO: 3044 - RNA, 20 nt, Artificial Sequence
  Synthetic
cuagagaauagaucucuggu

SEQ ID NO: 3045 - RNA, 21 nt, Artificial Sequence
  Synthetic
gcuagagaauagaucucuggu

SEQ ID NO: 3046 - RNA, 22 nt, Artificial Sequence
  Synthetic
agcuagagaauagaucucuggu

SEQ ID NO: 3047 - RNA, 23 nt, Artificial Sequence
  Synthetic
aagcuagagaauagaucucuggu

SEQ ID NO: 3048 - RNA, 24 nt, Artificial Sequence
  Synthetic
uaagcuagagaauagaucucuggu

SEQ ID NO: 3049 - RNA, 18 nt, Artificial Sequence
  Synthetic
ccacuacacagaaucugu

SEQ ID NO: 3050 - RNA, 19 nt, Artificial Sequence
  Synthetic
cccacuacacagaaucugu

SEQ ID NO: 3051 - RNA, 20 nt, Artificial Sequence
  Synthetic
ucccacuacacagaaucugu

SEQ ID NO: 3052 - RNA, 21 nt, Artificial Sequence
  Synthetic
aucccacuacacagaaucugu

SEQ ID NO: 3053 - RNA, 22 nt, Artificial Sequence
  Synthetic
caucccacuacacagaaucugu

SEQ ID NO: 3054 - RNA, 23 nt, Artificial Sequence
  Synthetic
ucaucccacuacacagaaucugu

SEQ ID NO: 3055 - RNA, 24 nt, Artificial Sequence
  Synthetic
cucaucccacuacacagaaucugu

SEQ ID NO: 3056 - RNA, 18 nt, Artificial Sequence
  Synthetic
auauuuuaagauaauugu

SEQ ID NO: 3057 - RNA, 19 nt, Artificial Sequence
  Synthetic
uauauuuuaagauaauugu

SEQ ID NO: 3058 - RNA, 20 nt, Artificial Sequence
  Synthetic
uuauauuuuaagauaauugu

SEQ ID NO: 3059 - RNA, 21 nt, Artificial Sequence
  Synthetic
auuauauuuuaagauaauugu

SEQ ID NO: 3060 - RNA, 22 nt, Artificial Sequence
  Synthetic
gauuauauuuuaagauaauugu

SEQ ID NO: 3061 - RNA, 23 nt, Artificial Sequence
  Synthetic
agauuauauuuuaagauaauugu

SEQ ID NO: 3062 - RNA, 24 nt, Artificial Sequence
  Synthetic
aagauuauauuuuaagauaauugu

SEQ ID NO: 3063 - RNA, 18 nt, Artificial Sequence
  Synthetic
ccggggagaguuucuugu

SEQ ID NO: 3064 - RNA, 19 nt, Artificial Sequence
  Synthetic
accggggagaguuucuugu

SEQ ID NO: 3065 - RNA, 20 nt, Artificial Sequence
  Synthetic
uaccggggagaguuucuugu

SEQ ID NO: 3066 - RNA, 21 nt, Artificial Sequence
  Synthetic
uuaccggggagaguuucuugu

SEQ ID NO: 3067 - RNA, 22 nt, Artificial Sequence
  Synthetic
cuuaccggggagaguuucuugu

SEQ ID NO: 3068 - RNA, 23 nt, Artificial Sequence
  Synthetic
acuuaccggggagaguuucuugu

SEQ ID NO: 3069 - RNA, 24 nt, Artificial Sequence
  Synthetic
uacuuaccggggagaguuucuugu

SEQ ID NO: 3070 - RNA, 18 nt, Artificial Sequence
  Synthetic
ucucugcaaaucuuucuu

SEQ ID NO: 3071 - RNA, 19 nt, Artificial Sequence
  Synthetic
cucucugcaaaucuuucuu

SEQ ID NO: 3072 - RNA, 20 nt, Artificial Sequence
  Synthetic
ucucucugcaaaucuuucuu

SEQ ID NO: 3073 - RNA, 21 nt, Artificial Sequence
  Synthetic
aucucucugcaaaucuuucuu

SEQ ID NO: 3074 - RNA, 22 nt, Artificial Sequence
  Synthetic
caucucucugcaaaucuuucuu

SEQ ID NO: 3075 - RNA, 23 nt, Artificial Sequence
  Synthetic
ucaucucucugcaaaucuuucuu

SEQ ID NO: 3076 - RNA, 24 nt, Artificial Sequence
  Synthetic
cucaucucucugcaaaucuuucuu

SEQ ID NO: 3077 - RNA, 18 nt, Artificial Sequence
  Synthetic
uaggaaaugcuguuucuu

SEQ ID NO: 3078 - RNA, 19 nt, Artificial Sequence
  Synthetic
guaggaaaugcuguuucuu

SEQ ID NO: 3079 - RNA, 20 nt, Artificial Sequence
  Synthetic
aguaggaaaugcuguuucuu

SEQ ID NO: 3080 - RNA, 21 nt, Artificial Sequence
  Synthetic
aaguaggaaaugcuguuucuu

SEQ ID NO: 3081 - RNA, 22 nt, Artificial Sequence
  Synthetic
aaaguaggaaaugcuguuucuu

SEQ ID NO: 3082 - RNA, 23 nt, Artificial Sequence
  Synthetic
aaaaguaggaaaugcuguuucuu

SEQ ID NO: 3083 - RNA, 24 nt, Artificial Sequence
  Synthetic
uaaaaguaggaaaugcuguuucuu

SEQ ID NO: 3084 - RNA, 18 nt, Artificial Sequence
  Synthetic
caguaaggcuaaaagguu

SEQ ID NO: 3085 - RNA, 19 nt, Artificial Sequence
  Synthetic
acaguaaggcuaaaagguu

SEQ ID NO: 3086 - RNA, 20 nt, Artificial Sequence
  Synthetic
aacaguaaggcuaaaagguu

SEQ ID NO: 3087 - RNA, 21 nt, Artificial Sequence
  Synthetic
caacaguaaggcuaaaagguu

SEQ ID NO: 3088 - RNA, 22 nt, Artificial Sequence
  Synthetic
ucaacaguaaggcuaaaagguu

SEQ ID NO: 3089 - RNA, 23 nt, Artificial Sequence
  Synthetic
uucaacaguaaggcuaaaagguu

SEQ ID NO: 3090 - RNA, 24 nt, Artificial Sequence
  Synthetic
uuucaacaguaaggcuaaaagguu

SEQ ID NO: 3091 - RNA, 18 nt, Artificial Sequence
  Synthetic
uggucugaagguuuauuu

SEQ ID NO: 3092 - RNA, 19 nt, Artificial Sequence
  Synthetic
cuggucugaagguuuauuu

SEQ ID NO: 3093 - RNA, 20 nt, Artificial Sequence
  Synthetic
ucuggucugaagguuuauuu

SEQ ID NO: 3094 - RNA, 21 nt, Artificial Sequence
  Synthetic
cucuggucugaagguuuauuu

SEQ ID NO: 3095 - RNA, 22 nt, Artificial Sequence
  Synthetic
ucucuggucugaagguuuauuu

SEQ ID NO: 3096 - RNA, 23 nt, Artificial Sequence
  Synthetic
aucucuggucugaagguuuauuu

SEQ ID NO: 3097 - RNA, 24 nt, Artificial Sequence
  Synthetic
gaucucuggucugaagguuuauuu

SEQ ID NO: 3098 - RNA, 18 nt, Artificial Sequence
  Synthetic
ucugcaaaucuuucuuuu

SEQ ID NO: 3099 - RNA, 19 nt, Artificial Sequence
  Synthetic
cucugcaaaucuuucuuuu

SEQ ID NO: 3100 - RNA, 20 nt, Artificial Sequence
  Synthetic
ucucugcaaaucuuucuuuu

SEQ ID NO: 3101 - RNA, 21 nt, Artificial Sequence
  Synthetic
cucucugcaaaucuuucuuuu

SEQ ID NO: 3102 - RNA, 22 nt, Artificial Sequence
  Synthetic
ucucucugcaaaucuuucuuuu

SEQ ID NO: 3103 - RNA, 23 nt, Artificial Sequence
  Synthetic
aucucucugcaaaucuuucuuuu

SEQ ID NO: 3104 - RNA, 24 nt, Artificial Sequence
  Synthetic
caucucucugcaaaucuuucuuuu

SEQ ID NO: 3105 - RNA, 18 nt, Artificial Sequence
  Synthetic
ggggagaguggagaaaaa

SEQ ID NO: 3106 - RNA, 19 nt, Artificial Sequence
  Synthetic
cggggagaguggagaaaaa

SEQ ID NO: 3107 - RNA, 20 nt, Artificial Sequence
  Synthetic
acggggagaguggagaaaaa

SEQ ID NO: 3108 - RNA, 21 nt, Artificial Sequence
  Synthetic
uacggggagaguggagaaaaa

SEQ ID NO: 3109 - RNA, 22 nt, Artificial Sequence
  Synthetic
auacggggagaguggagaaaaa

SEQ ID NO: 3110 - RNA, 23 nt, Artificial Sequence
  Synthetic
gauacggggagaguggagaaaaa

SEQ ID NO: 3111 - RNA, 24 nt, Artificial Sequence
  Synthetic
ggauacggggagaguggagaaaaa

SEQ ID NO: 3112 - RNA, 18 nt, Artificial Sequence
  Synthetic
cggggagaguggagaaaa

SEQ ID NO: 3113 - RNA, 19 nt, Artificial Sequence
  Synthetic
acggggagaguggagaaaa

SEQ ID NO: 3114 - RNA, 20 nt, Artificial Sequence
  Synthetic
uacggggagaguggagaaaa

SEQ ID NO: 3115 - RNA, 21 nt, Artificial Sequence
  Synthetic
auacggggagaguggagaaaa

SEQ ID NO: 3116 - RNA, 22 nt, Artificial Sequence
  Synthetic
gauacggggagaguggagaaaa

SEQ ID NO: 3117 - RNA, 23 nt, Artificial Sequence
  Synthetic
ggauacggggagaguggagaaaa

SEQ ID NO: 3118 - RNA, 24 nt, Artificial Sequence
  Synthetic
gggauacggggagaguggagaaaa

SEQ ID NO: 3119 - RNA, 18 nt, Artificial Sequence
  Synthetic
acggggagaguggagaaa

SEQ ID NO: 3120 - RNA, 19 nt, Artificial Sequence
  Synthetic
uacggggagaguggagaaa

SEQ ID NO: 3121 - RNA, 20 nt, Artificial Sequence
  Synthetic
auacggggagaguggagaaa

SEQ ID NO: 3122 - RNA, 21 nt, Artificial Sequence
  Synthetic
gauacggggagaguggagaaa

SEQ ID NO: 3123 - RNA, 22 nt, Artificial Sequence
  Synthetic
ggauacggggagaguggagaaa

SEQ ID NO: 3124 - RNA, 23 nt, Artificial Sequence
  Synthetic
gggauacggggagaguggagaaa

SEQ ID NO: 3125 - RNA, 24 nt, Artificial Sequence
  Synthetic
ggggauacggggagaguggagaaa

SEQ ID NO: 3126 - RNA, 18 nt, Artificial Sequence
  Synthetic
uuuuaagcucaacuuaaa

SEQ ID NO: 3127 - RNA, 19 nt, Artificial Sequence
  Synthetic
auuuuaagcucaacuuaaa

SEQ ID NO: 3128 - RNA, 20 nt, Artificial Sequence
  Synthetic
uauuuuaagcucaacuuaaa

SEQ ID NO: 3129 - RNA, 21 nt, Artificial Sequence
  Synthetic
uuauuuuaagcucaacuuaaa

SEQ ID NO: 3130 - RNA, 22 nt, Artificial Sequence
  Synthetic
cuuauuuuaagcucaacuuaaa

SEQ ID NO: 3131 - RNA, 23 nt, Artificial Sequence
  Synthetic
gcuuauuuuaagcucaacuuaaa

SEQ ID NO: 3132 - RNA, 24 nt, Artificial Sequence
  Synthetic
agcuuauuuuaagcucaacuuaaa

SEQ ID NO: 3133 - RNA, 18 nt, Artificial Sequence
  Synthetic
ugagugaaagacuuuaaa

SEQ ID NO: 3134 - RNA, 19 nt, Artificial Sequence
  Synthetic
gugagugaaagacuuuaaa

SEQ ID NO: 3135 - RNA, 20 nt, Artificial Sequence
  Synthetic
ugugagugaaagacuuuaaa

SEQ ID NO: 3136 - RNA, 21 nt, Artificial Sequence
  Synthetic
uugugagugaaagacuuuaaa

SEQ ID NO: 3137 - RNA, 22 nt, Artificial Sequence
  Synthetic
auugugagugaaagacuuuaaa

SEQ ID NO: 3138 - RNA, 23 nt, Artificial Sequence
  Synthetic
gauugugagugaaagacuuuaaa

SEQ ID NO: 3139 - RNA, 24 nt, Artificial Sequence
  Synthetic
ugauugugagugaaagacuuuaaa

SEQ ID NO: 3140 - RNA, 18 nt, Artificial Sequence
  Synthetic
acaauccuuaccucucaa

SEQ ID NO: 3141 - RNA, 19 nt, Artificial Sequence
  Synthetic
aacaauccuuaccucucaa

SEQ ID NO: 3142 - RNA, 20 nt, Artificial Sequence
  Synthetic
uaacaauccuuaccucucaa

SEQ ID NO: 3143 - RNA, 21 nt, Artificial Sequence
  Synthetic
cuaacaauccuuaccucucaa

SEQ ID NO: 3144 - RNA, 22 nt, Artificial Sequence
  Synthetic
acuaacaauccuuaccucucaa

SEQ ID NO: 3145 - RNA, 23 nt, Artificial Sequence
  Synthetic
aacuaacaauccuuaccucucaa

SEQ ID NO: 3146 - RNA, 24 nt, Artificial Sequence
  Synthetic
uaacuaacaauccuuaccucucaa

SEQ ID NO: 3147 - RNA, 18 nt, Artificial Sequence
  Synthetic
aacuccacccuccuucaa

SEQ ID NO: 3148 - RNA, 19 nt, Artificial Sequence
  Synthetic
uaacuccacccuccuucaa

SEQ ID NO: 3149 - RNA, 20 nt, Artificial Sequence
  Synthetic
uuaacuccacccuccuucaa

SEQ ID NO: 3150 - RNA, 21 nt, Artificial Sequence
  Synthetic
uuuaacuccacccuccuucaa

SEQ ID NO: 3151 - RNA, 22 nt, Artificial Sequence
  Synthetic
auuuaacuccacccuccuucaa

SEQ ID NO: 3152 - RNA, 23 nt, Artificial Sequence
  Synthetic
gauuuaacuccacccuccuucaa

SEQ ID NO: 3153 - RNA, 24 nt, Artificial Sequence
  Synthetic
ugauuuaacuccacccuccuucaa

SEQ ID NO: 3154 - RNA, 18 nt, Artificial Sequence
  Synthetic
gugagugaaagacuuuaa

SEQ ID NO: 3155 - RNA, 19 nt, Artificial Sequence
  Synthetic
ugugagugaaagacuuuaa

SEQ ID NO: 3156 - RNA, 20 nt, Artificial Sequence
  Synthetic
uugugagugaaagacuuuaa

SEQ ID NO: 3157 - RNA, 21 nt, Artificial Sequence
  Synthetic
auugugagugaaagacuuuaa

SEQ ID NO: 3158 - RNA, 22 nt, Artificial Sequence
  Synthetic
gauugugagugaaagacuuuaa

SEQ ID NO: 3159 - RNA, 23 nt, Artificial Sequence
  Synthetic
ugauugugagugaaagacuuuaa

SEQ ID NO: 3160 - RNA, 24 nt, Artificial Sequence
  Synthetic
augauugugagugaaagacuuuaa

SEQ ID NO: 3161 - RNA, 18 nt, Artificial Sequence
  Synthetic
gacuuuacaggaaaccca

SEQ ID NO: 3162 - RNA, 19 nt, Artificial Sequence
  Synthetic
agacuuuacaggaaaccca

SEQ ID NO: 3163 - RNA, 20 nt, Artificial Sequence
  Synthetic
aagacuuuacaggaaaccca

SEQ ID NO: 3164 - RNA, 21 nt, Artificial Sequence
  Synthetic
aaagacuuuacaggaaaccca

SEQ ID NO: 3165 - RNA, 22 nt, Artificial Sequence
  Synthetic
aaaagacuuuacaggaaaccca

SEQ ID NO: 3166 - RNA, 23 nt, Artificial Sequence
  Synthetic
uaaaagacuuuacaggaaaccca

SEQ ID NO: 3167 - RNA, 24 nt, Artificial Sequence
  Synthetic
guaaaagacuuuacaggaaaccca

SEQ ID NO: 3168 - RNA, 18 nt, Artificial Sequence
  Synthetic
caaaaacaaaauaaucca

SEQ ID NO: 3169 - RNA, 19 nt, Artificial Sequence
  Synthetic
acaaaaacaaaauaaucca

SEQ ID NO: 3170 - RNA, 20 nt, Artificial Sequence
  Synthetic
aacaaaaacaaaauaaucca

SEQ ID NO: 3171 - RNA, 21 nt, Artificial Sequence
  Synthetic
gaacaaaaacaaaauaaucca

SEQ ID NO: 3172 - RNA, 22 nt, Artificial Sequence
  Synthetic
agaacaaaaacaaaauaaucca

SEQ ID NO: 3173 - RNA, 23 nt, Artificial Sequence
  Synthetic
gagaacaaaaacaaaauaaucca

SEQ ID NO: 3174 - RNA, 24 nt, Artificial Sequence
  Synthetic
agagaacaaaaacaaaauaaucca

SEQ ID NO: 3175 - RNA, 18 nt, Artificial Sequence
  Synthetic
agaacuaaacccucucca

SEQ ID NO: 3176 - RNA, 19 nt, Artificial Sequence
  Synthetic
gagaacuaaacccucucca

SEQ ID NO: 3177 - RNA, 20 nt, Artificial Sequence
  Synthetic
ggagaacuaaacccucucca

SEQ ID NO: 3178 - RNA, 21 nt, Artificial Sequence
  Synthetic
aggagaacuaaacccucucca

SEQ ID NO: 3179 - RNA, 22 nt, Artificial Sequence
  Synthetic
aaggagaacuaaacccucucca

SEQ ID NO: 3180 - RNA, 23 nt, Artificial Sequence
  Synthetic
uaaggagaacuaaacccucucca

SEQ ID NO: 3181 - RNA, 24 nt, Artificial Sequence
  Synthetic
cuaaggagaacuaaacccucucca

SEQ ID NO: 3182 - RNA, 18 nt, Artificial Sequence
  Synthetic
uguguagugggaugagca

SEQ ID NO: 3183 - RNA, 19 nt, Artificial Sequence
  Synthetic
cuguguagugggaugagca

SEQ ID NO: 3184 - RNA, 20 nt, Artificial Sequence
  Synthetic
ucuguguagugggaugagca

SEQ ID NO: 3185 - RNA, 21 nt, Artificial Sequence
  Synthetic
uucuguguagugggaugagca

SEQ ID NO: 3186 - RNA, 22 nt, Artificial Sequence
  Synthetic
auucuguguagugggaugagca

SEQ ID NO: 3187 - RNA, 23 nt, Artificial Sequence
  Synthetic
gauucuguguagugggaugagca

SEQ ID NO: 3188 - RNA, 24 nt, Artificial Sequence
  Synthetic
agauucuguguagugggaugagca

SEQ ID NO: 3189 - RNA, 18 nt, Artificial Sequence
  Synthetic
ucaaaagaaagauuugca

SEQ ID NO: 3190 - RNA, 19 nt, Artificial Sequence
  Synthetic
cucaaaagaaagauuugca

SEQ ID NO: 3191 - RNA, 20 nt, Artificial Sequence
  Synthetic
ucucaaaagaaagauuugca

SEQ ID NO: 3192 - RNA, 21 nt, Artificial Sequence
  Synthetic
cucucaaaagaaagauuugca

SEQ ID NO: 3193 - RNA, 22 nt, Artificial Sequence
  Synthetic
ccucucaaaagaaagauuugca

SEQ ID NO: 3194 - RNA, 23 nt, Artificial Sequence
  Synthetic
accucucaaaagaaagauuugca

SEQ ID NO: 3195 - RNA, 24 nt, Artificial Sequence
  Synthetic
uaccucucaaaagaaagauuugca

SEQ ID NO: 3196 - RNA, 18 nt, Artificial Sequence
  Synthetic
auaggggauacggggaga

SEQ ID NO: 3197 - RNA, 19 nt, Artificial Sequence
  Synthetic
gauaggggauacggggaga

SEQ ID NO: 3198 - RNA, 20 nt, Artificial Sequence
  Synthetic
ggauaggggauacggggaga

SEQ ID NO: 3199 - RNA, 21 nt, Artificial Sequence
  Synthetic
gggauaggggauacggggaga

SEQ ID NO: 3200 - RNA, 22 nt, Artificial Sequence
  Synthetic
ugggauaggggauacggggaga

SEQ ID NO: 3201 - RNA, 23 nt, Artificial Sequence
  Synthetic
gugggauaggggauacggggaga

SEQ ID NO: 3202 - RNA, 24 nt, Artificial Sequence
  Synthetic
ggugggauaggggauacggggaga

SEQ ID NO: 3203 - RNA, 18 nt, Artificial Sequence
  Synthetic
guggggguugggguggga

SEQ ID NO: 3204 - RNA, 19 nt, Artificial Sequence
  Synthetic
uguggggguugggguggga

SEQ ID NO: 3205 - RNA, 20 nt, Artificial Sequence
  Synthetic
guguggggguugggguggga

SEQ ID NO: 3206 - RNA, 21 nt, Artificial Sequence
  Synthetic
uguguggggguugggguggga

SEQ ID NO: 3207 - RNA, 22 nt, Artificial Sequence
  Synthetic
cuguguggggguugggguggga

SEQ ID NO: 3208 - RNA, 23 nt, Artificial Sequence
  Synthetic
ucuguguggggguugggguggga

SEQ ID NO: 3209 - RNA, 24 nt, Artificial Sequence
  Synthetic
aucuguguggggguugggguggga

SEQ ID NO: 3210 - RNA, 18 nt, Artificial Sequence
  Synthetic
uacaaaacaugauuguga

SEQ ID NO: 3211 - RNA, 19 nt, Artificial Sequence
  Synthetic
auacaaaacaugauuguga

SEQ ID NO: 3212 - RNA, 20 nt, Artificial Sequence
  Synthetic
gauacaaaacaugauuguga

SEQ ID NO: 3213 - RNA, 21 nt, Artificial Sequence
  Synthetic
agauacaaaacaugauuguga

SEQ ID NO: 3214 - RNA, 22 nt, Artificial Sequence
  Synthetic
aagauacaaaacaugauuguga

SEQ ID NO: 3215 - RNA, 23 nt, Artificial Sequence
  Synthetic
aaagauacaaaacaugauuguga

SEQ ID NO: 3216 - RNA, 24 nt, Artificial Sequence
  Synthetic
caaagauacaaaacaugauuguga

SEQ ID NO: 3217 - RNA, 18 nt, Artificial Sequence
  Synthetic
aauauaaucuuuaagaua

SEQ ID NO: 3218 - RNA, 19 nt, Artificial Sequence
  Synthetic
aaauauaaucuuuaagaua

SEQ ID NO: 3219 - RNA, 20 nt, Artificial Sequence
  Synthetic
aaaauauaaucuuuaagaua

SEQ ID NO: 3220 - RNA, 21 nt, Artificial Sequence
  Synthetic
uaaaauauaaucuuuaagaua

SEQ ID NO: 3221 - RNA, 22 nt, Artificial Sequence
  Synthetic
uuaaaauauaaucuuuaagaua

SEQ ID NO: 3222 - RNA, 23 nt, Artificial Sequence
  Synthetic
cuuaaaauauaaucuuuaagaua

SEQ ID NO: 3223 - RNA, 24 nt, Artificial Sequence
  Synthetic
ucuuaaaauauaaucuuuaagaua

SEQ ID NO: 3224 - RNA, 18 nt, Artificial Sequence
  Synthetic
ggggugggauaggggaua

SEQ ID NO: 3225 - RNA, 19 nt, Artificial Sequence
  Synthetic
uggggugggauaggggaua

SEQ ID NO: 3226 - RNA, 20 nt, Artificial Sequence
  Synthetic
uuggggugggauaggggaua

SEQ ID NO: 3227 - RNA, 21 nt, Artificial Sequence
  Synthetic
guuggggugggauaggggaua

SEQ ID NO: 3228 - RNA, 22 nt, Artificial Sequence
  Synthetic
gguuggggugggauaggggaua

SEQ ID NO: 3229 - RNA, 23 nt, Artificial Sequence
  Synthetic
ggguuggggugggauaggggaua

SEQ ID NO: 3230 - RNA, 24 nt, Artificial Sequence
  Synthetic
gggguuggggugggauaggggaua

SEQ ID NO: 3231 - RNA, 18 nt, Artificial Sequence
  Synthetic
aaaucuuaucuucugcua

SEQ ID NO: 3232 - RNA, 19 nt, Artificial Sequence
  Synthetic
gaaaucuuaucuucugcua

SEQ ID NO: 3233 - RNA, 20 nt, Artificial Sequence
  Synthetic
ugaaaucuuaucuucugcua

SEQ ID NO: 3234 - RNA, 21 nt, Artificial Sequence
  Synthetic
uugaaaucuuaucuucugcua

SEQ ID NO: 3235 - RNA, 22 nt, Artificial Sequence
  Synthetic
cuugaaaucuuaucuucugcua

SEQ ID NO: 3236 - RNA, 23 nt, Artificial Sequence
  Synthetic
ucuugaaaucuuaucuucugcua

SEQ ID NO: 3237 - RNA, 24 nt, Artificial Sequence
  Synthetic
aucuugaaaucuuaucuucugcua

SEQ ID NO: 3238 - RNA, 18 nt, Artificial Sequence
  Synthetic
ucuaacagauucugugua

SEQ ID NO: 3239 - RNA, 19 nt, Artificial Sequence
  Synthetic
uucuaacagauucugugua

SEQ ID NO: 3240 - RNA, 20 nt, Artificial Sequence
  Synthetic
uuucuaacagauucugugua

SEQ ID NO: 3241 - RNA, 21 nt, Artificial Sequence
  Synthetic
uuuucuaacagauucugugua

SEQ ID NO: 3242 - RNA, 22 nt, Artificial Sequence
  Synthetic
auuuucuaacagauucugugua

SEQ ID NO: 3243 - RNA, 23 nt, Artificial Sequence
  Synthetic
uauuuucuaacagauucugugua

SEQ ID NO: 3244 - RNA, 24 nt, Artificial Sequence
  Synthetic
auauuuucuaacagauucugugua

SEQ ID NO: 3245 - RNA, 18 nt, Artificial Sequence
  Synthetic
gaugaguaaaagacuuua

SEQ ID NO: 3246 - RNA, 19 nt, Artificial Sequence
  Synthetic
agaugaguaaaagacuuua

SEQ ID NO: 3247 - RNA, 20 nt, Artificial Sequence
  Synthetic
gagaugaguaaaagacuuua

SEQ ID NO: 3248 - RNA, 21 nt, Artificial Sequence
  Synthetic
ugagaugaguaaaagacuuua

SEQ ID NO: 3249 - RNA, 22 nt, Artificial Sequence
  Synthetic
cugagaugaguaaaagacuuua

SEQ ID NO: 3250 - RNA, 23 nt, Artificial Sequence
  Synthetic
ucugagaugaguaaaagacuuua

SEQ ID NO: 3251 - RNA, 24 nt, Artificial Sequence
  Synthetic
uucugagaugaguaaaagacuuua

SEQ ID NO: 3252 - RNA, 18 nt, Artificial Sequence
  Synthetic
ugugagugaaagacuuua

SEQ ID NO: 3253 - RNA, 19 nt, Artificial Sequence
  Synthetic
uugugagugaaagacuuua

SEQ ID NO: 3254 - RNA, 20 nt, Artificial Sequence
  Synthetic
auugugagugaaagacuuua

SEQ ID NO: 3255 - RNA, 21 nt, Artificial Sequence
  Synthetic
gauugugagugaaagacuuua

SEQ ID NO: 3256 - RNA, 22 nt, Artificial Sequence
  Synthetic
ugauugugagugaaagacuuua

SEQ ID NO: 3257 - RNA, 23 nt, Artificial Sequence
  Synthetic
augauugugagugaaagacuuua

SEQ ID NO: 3258 - RNA, 24 nt, Artificial Sequence
  Synthetic
caugauugugagugaaagacuuua

SEQ ID NO: 3259 - RNA, 18 nt, Artificial Sequence
  Synthetic
guaaauaaaccuucagac

SEQ ID NO: 3260 - RNA, 19 nt, Artificial Sequence
  Synthetic
cguaaauaaaccuucagac

SEQ ID NO: 3261 - RNA, 20 nt, Artificial Sequence
  Synthetic
ccguaaauaaaccuucagac

SEQ ID NO: 3262 - RNA, 21 nt, Artificial Sequence
  Synthetic
cccguaaauaaaccuucagac

SEQ ID NO: 3263 - RNA, 22 nt, Artificial Sequence
  Synthetic
gcccguaaauaaaccuucagac

SEQ ID NO: 3264 - RNA, 23 nt, Artificial Sequence
  Synthetic
agcccguaaauaaaccuucagac

SEQ ID NO: 3265 - RNA, 24 nt, Artificial Sequence
  Synthetic
aagcccguaaauaaaccuucagac

SEQ ID NO: 3266 - RNA, 18 nt, Artificial Sequence
  Synthetic
gggugggauaggggauac

SEQ ID NO: 3267 - RNA, 19 nt, Artificial Sequence
  Synthetic
ggggugggauaggggauac

SEQ ID NO: 3268 - RNA, 20 nt, Artificial Sequence
  Synthetic
uggggugggauaggggauac

SEQ ID NO: 3269 - RNA, 21 nt, Artificial Sequence
  Synthetic
uuggggugggauaggggauac

SEQ ID NO: 3270 - RNA, 22 nt, Artificial Sequence
  Synthetic
guuggggugggauaggggauac

SEQ ID NO: 3271 - RNA, 23 nt, Artificial Sequence
  Synthetic
gguuggggugggauaggggauac

SEQ ID NO: 3272 - RNA, 24 nt, Artificial Sequence
  Synthetic
ggguuggggugggauaggggauac

SEQ ID NO: 3273 - RNA, 18 nt, Artificial Sequence
  Synthetic
agacauccguuccccuac

SEQ ID NO: 3274 - RNA, 19 nt, Artificial Sequence
  Synthetic
gagacauccguuccccuac

SEQ ID NO: 3275 - RNA, 20 nt, Artificial Sequence
  Synthetic
ugagacauccguuccccuac

SEQ ID NO: 3276 - RNA, 21 nt, Artificial Sequence
  Synthetic
cugagacauccguuccccuac

SEQ ID NO: 3277 - RNA, 22 nt, Artificial Sequence
  Synthetic
gcugagacauccguuccccuac

SEQ ID NO: 3278 - RNA, 23 nt, Artificial Sequence
  Synthetic
agcugagacauccguuccccuac

SEQ ID NO: 3279 - RNA, 24 nt, Artificial Sequence
  Synthetic
gagcugagacauccguuccccuac

SEQ ID NO: 3280 - RNA, 18 nt, Artificial Sequence
  Synthetic
augaguaaaagacuuuac

SEQ ID NO: 3281 - RNA, 19 nt, Artificial Sequence
  Synthetic
gaugaguaaaagacuuuac

SEQ ID NO: 3282 - RNA, 20 nt, Artificial Sequence
  Synthetic
agaugaguaaaagacuuuac

SEQ ID NO: 3283 - RNA, 21 nt, Artificial Sequence
  Synthetic
gagaugaguaaaagacuuuac

SEQ ID NO: 3284 - RNA, 22 nt, Artificial Sequence
  Synthetic
ugagaugaguaaaagacuuuac

SEQ ID NO: 3285 - RNA, 23 nt, Artificial Sequence
  Synthetic
cugagaugaguaaaagacuuuac

SEQ ID NO: 3286 - RNA, 24 nt, Artificial Sequence
  Synthetic
ucugagaugaguaaaagacuuuac

SEQ ID NO: 3287 - RNA, 18 nt, Artificial Sequence
  Synthetic
uugcacagcucaucuggc

SEQ ID NO: 3288 - RNA, 19 nt, Artificial Sequence
  Synthetic
uuugcacagcucaucuggc

SEQ ID NO: 3289 - RNA, 20 nt, Artificial Sequence
  Synthetic
auuugcacagcucaucuggc

SEQ ID NO: 3290 - RNA, 21 nt, Artificial Sequence
  Synthetic
gauuugcacagcucaucuggc

SEQ ID NO: 3291 - RNA, 22 nt, Artificial Sequence
  Synthetic
ugauuugcacagcucaucuggc

SEQ ID NO: 3292 - RNA, 23 nt, Artificial Sequence
  Synthetic
uugauuugcacagcucaucuggc

SEQ ID NO: 3293 - RNA, 24 nt, Artificial Sequence
  Synthetic
auugauuugcacagcucaucuggc

SEQ ID NO: 3294 - RNA, 18 nt, Artificial Sequence
  Synthetic
ugagucuuagcugaaauc

SEQ ID NO: 3295 - RNA, 19 nt, Artificial Sequence
  Synthetic
augagucuuagcugaaauc

SEQ ID NO: 3296 - RNA, 20 nt, Artificial Sequence
  Synthetic
gaugagucuuagcugaaauc

SEQ ID NO: 3297 - RNA, 21 nt, Artificial Sequence
  Synthetic
agaugagucuuagcugaaauc

SEQ ID NO: 3298 - RNA, 22 nt, Artificial Sequence
  Synthetic
gagaugagucuuagcugaaauc

SEQ ID NO: 3299 - RNA, 23 nt, Artificial Sequence
  Synthetic
agagaugagucuuagcugaaauc

SEQ ID NO: 3300 - RNA, 24 nt, Artificial Sequence
  Synthetic
gagagaugagucuuagcugaaauc

SEQ ID NO: 3301 - RNA, 18 nt, Artificial Sequence
  Synthetic
uaagcucaacuuaaaaag

SEQ ID NO: 3302 - RNA, 19 nt, Artificial Sequence
  Synthetic
uuaagcucaacuuaaaaag

SEQ ID NO: 3303 - RNA, 20 nt, Artificial Sequence
  Synthetic
uuuaagcucaacuuaaaaag

SEQ ID NO: 3304 - RNA, 21 nt, Artificial Sequence
  Synthetic
uuuuaagcucaacuuaaaaag

SEQ ID NO: 3305 - RNA, 22 nt, Artificial Sequence
  Synthetic
auuuuaagcucaacuuaaaaag

SEQ ID NO: 3306 - RNA, 23 nt, Artificial Sequence
  Synthetic
uauuuuaagcucaacuuaaaaag

SEQ ID NO: 3307 - RNA, 24 nt, Artificial Sequence
  Synthetic
uuauuuuaagcucaacuuaaaaag

SEQ ID NO: 3308 - RNA, 18 nt, Artificial Sequence
  Synthetic
aucuuaucuucugcuaag

SEQ ID NO: 3309 - RNA, 19 nt, Artificial Sequence
  Synthetic
aaucuuaucuucugcuaag

SEQ ID NO: 3310 - RNA, 20 nt, Artificial Sequence
  Synthetic
aaaucuuaucuucugcuaag

SEQ ID NO: 3311 - RNA, 21 nt, Artificial Sequence
  Synthetic
gaaaucuuaucuucugcuaag

SEQ ID NO: 3312 - RNA, 22 nt, Artificial Sequence
  Synthetic
ugaaaucuuaucuucugcuaag

SEQ ID NO: 3313 - RNA, 23 nt, Artificial Sequence
  Synthetic
uugaaaucuuaucuucugcuaag

SEQ ID NO: 3314 - RNA, 24 nt, Artificial Sequence
  Synthetic
cuugaaaucuuaucuucugcuaag

SEQ ID NO: 3315 - RNA, 18 nt, Artificial Sequence
  Synthetic
cacagcucaucuggccag

SEQ ID NO: 3316 - RNA, 19 nt, Artificial Sequence
  Synthetic
gcacagcucaucuggccag

SEQ ID NO: 3317 - RNA, 20 nt, Artificial Sequence
  Synthetic
ugcacagcucaucuggccag

SEQ ID NO: 3318 - RNA, 21 nt, Artificial Sequence
  Synthetic
uugcacagcucaucuggccag

SEQ ID NO: 3319 - RNA, 22 nt, Artificial Sequence
  Synthetic
uuugcacagcucaucuggccag

SEQ ID NO: 3320 - RNA, 23 nt, Artificial Sequence
  Synthetic
auuugcacagcucaucuggccag

SEQ ID NO: 3321 - RNA, 24 nt, Artificial Sequence
  Synthetic
gauuugcacagcucaucuggccag

SEQ ID NO: 3322 - RNA, 18 nt, Artificial Sequence
  Synthetic
cucaucuggccagaagag

SEQ ID NO: 3323 - RNA, 19 nt, Artificial Sequence
  Synthetic
gcucaucuggccagaagag

SEQ ID NO: 3324 - RNA, 20 nt, Artificial Sequence
  Synthetic
agcucaucuggccagaagag

SEQ ID NO: 3325 - RNA, 21 nt, Artificial Sequence
  Synthetic
cagcucaucuggccagaagag

SEQ ID NO: 3326 - RNA, 22 nt, Artificial Sequence
  Synthetic
acagcucaucuggccagaagag

SEQ ID NO: 3327 - RNA, 23 nt, Artificial Sequence
  Synthetic
cacagcucaucuggccagaagag

SEQ ID NO: 3328 - RNA, 24 nt, Artificial Sequence
  Synthetic
gcacagcucaucuggccagaagag

SEQ ID NO: 3329 - RNA, 18 nt, Artificial Sequence
  Synthetic
uaggggauacggggagag

SEQ ID NO: 3330 - RNA, 19 nt, Artificial Sequence
  Synthetic
auaggggauacggggagag

SEQ ID NO: 3331 - RNA, 20 nt, Artificial Sequence
  Synthetic
gauaggggauacggggagag

SEQ ID NO: 3332 - RNA, 21 nt, Artificial Sequence
  Synthetic
ggauaggggauacggggagag

SEQ ID NO: 3333 - RNA, 22 nt, Artificial Sequence
  Synthetic
gggauaggggauacggggagag

SEQ ID NO: 3334 - RNA, 23 nt, Artificial Sequence
  Synthetic
ugggauaggggauacggggagag

SEQ ID NO: 3335 - RNA, 24 nt, Artificial Sequence
  Synthetic
gugggauaggggauacggggagag

SEQ ID NO: 3336 - RNA, 18 nt, Artificial Sequence
  Synthetic
ucuguguagugggaugag

SEQ ID NO: 3337 - RNA, 19 nt, Artificial Sequence
  Synthetic
uucuguguagugggaugag

SEQ ID NO: 3338 - RNA, 20 nt, Artificial Sequence
  Synthetic
auucuguguagugggaugag

SEQ ID NO: 3339 - RNA, 21 nt, Artificial Sequence
  Synthetic
gauucuguguagugggaugag

SEQ ID NO: 3340 - RNA, 22 nt, Artificial Sequence
  Synthetic
agauucuguguagugggaugag

SEQ ID NO: 3341 - RNA, 23 nt, Artificial Sequence
  Synthetic
cagauucuguguagugggaugag

SEQ ID NO: 3342 - RNA, 24 nt, Artificial Sequence
  Synthetic
acagauucuguguagugggaugag

SEQ ID NO: 3343 - RNA, 18 nt, Artificial Sequence
  Synthetic
cagagagaugagucuuag

SEQ ID NO: 3344 - RNA, 19 nt, Artificial Sequence
  Synthetic
gcagagagaugagucuuag

SEQ ID NO: 3345 - RNA, 20 nt, Artificial Sequence
  Synthetic
ugcagagagaugagucuuag

SEQ ID NO: 3346 - RNA, 21 nt, Artificial Sequence
  Synthetic
uugcagagagaugagucuuag

SEQ ID NO: 3347 - RNA, 22 nt, Artificial Sequence
  Synthetic
uuugcagagagaugagucuuag

SEQ ID NO: 3348 - RNA, 23 nt, Artificial Sequence
  Synthetic
auuugcagagagaugagucuuag

SEQ ID NO: 3349 - RNA, 24 nt, Artificial Sequence
  Synthetic
gauuugcagagagaugagucuuag

SEQ ID NO: 3350 - RNA, 18 nt, Artificial Sequence
  Synthetic
ggugggauaggggauacg

SEQ ID NO: 3351 - RNA, 19 nt, Artificial Sequence
  Synthetic
gggugggauaggggauacg

SEQ ID NO: 3352 - RNA, 20 nt, Artificial Sequence
  Synthetic
ggggugggauaggggauacg

SEQ ID NO: 3353 - RNA, 21 nt, Artificial Sequence
  Synthetic
uggggugggauaggggauacg

SEQ ID NO: 3354 - RNA, 22 nt, Artificial Sequence
  Synthetic
uuggggugggauaggggauacg

SEQ ID NO: 3355 - RNA, 23 nt, Artificial Sequence
  Synthetic
guuggggugggauaggggauacg

SEQ ID NO: 3356 - RNA, 24 nt, Artificial Sequence
  Synthetic
gguuggggugggauaggggauacg

SEQ ID NO: 3357 - RNA, 18 nt, Artificial Sequence
  Synthetic
ugagcaucuguguggggg

SEQ ID NO: 3358 - RNA, 19 nt, Artificial Sequence
  Synthetic
gugagcaucuguguggggg

SEQ ID NO: 3359 - RNA, 20 nt, Artificial Sequence
  Synthetic
ggugagcaucuguguggggg

SEQ ID NO: 3360 - RNA, 21 nt, Artificial Sequence
  Synthetic
uggugagcaucuguguggggg

SEQ ID NO: 3361 - RNA, 22 nt, Artificial Sequence
  Synthetic
guggugagcaucuguguggggg

SEQ ID NO: 3362 - RNA, 23 nt, Artificial Sequence
  Synthetic
gguggugagcaucuguguggggg

SEQ ID NO: 3363 - RNA, 24 nt, Artificial Sequence
  Synthetic
ggguggugagcaucuguguggggg

SEQ ID NO: 3364 - RNA, 18 nt, Artificial Sequence
  Synthetic
cagauucuguguaguggg

SEQ ID NO: 3365 - RNA, 19 nt, Artificial Sequence
  Synthetic
acagauucuguguaguggg

SEQ ID NO: 3366 - RNA, 20 nt, Artificial Sequence
  Synthetic
aacagauucuguguaguggg

SEQ ID NO: 3367 - RNA, 21 nt, Artificial Sequence
  Synthetic
uaacagauucuguguaguggg

SEQ ID NO: 3368 - RNA, 22 nt, Artificial Sequence
  Synthetic
cuaacagauucuguguaguggg

SEQ ID NO: 3369 - RNA, 23 nt, Artificial Sequence
  Synthetic
ucuaacagauucuguguaguggg

SEQ ID NO: 3370 - RNA, 24 nt, Artificial Sequence
  Synthetic
uucuaacagauucuguguaguggg

SEQ ID NO: 3371 - RNA, 18 nt, Artificial Sequence
  Synthetic
aucuguguggggguuggg

SEQ ID NO: 3372 - RNA, 19 nt, Artificial Sequence
  Synthetic
caucuguguggggguuggg

SEQ ID NO: 3373 - RNA, 20 nt, Artificial Sequence
  Synthetic
gcaucuguguggggguuggg

SEQ ID NO: 3374 - RNA, 21 nt, Artificial Sequence
  Synthetic
agcaucuguguggggguuggg

SEQ ID NO: 3375 - RNA, 22 nt, Artificial Sequence
  Synthetic
gagcaucuguguggggguuggg

SEQ ID NO: 3376 - RNA, 23 nt, Artificial Sequence
  Synthetic
ugagcaucuguguggggguuggg

SEQ ID NO: 3377 - RNA, 24 nt, Artificial Sequence
  Synthetic
gugagcaucuguguggggguuggg

SEQ ID NO: 3378 - RNA, 18 nt, Artificial Sequence
  Synthetic
aaccuuuuagccuuacug

SEQ ID NO: 3379 - RNA, 19 nt, Artificial Sequence
  Synthetic
uaaccuuuuagccuuacug

SEQ ID NO: 3380 - RNA, 20 nt, Artificial Sequence
  Synthetic
uuaaccuuuuagccuuacug

SEQ ID NO: 3381 - RNA, 21 nt, Artificial Sequence
  Synthetic
cuuaaccuuuuagccuuacug

SEQ ID NO: 3382 - RNA, 22 nt, Artificial Sequence
  Synthetic
ucuuaaccuuuuagccuuacug

SEQ ID NO: 3383 - RNA, 23 nt, Artificial Sequence
  Synthetic
uucuuaaccuuuuagccuuacug

SEQ ID NO: 3384 - RNA, 24 nt, Artificial Sequence
  Synthetic
uuucuuaaccuuuuagccuuacug

SEQ ID NO: 3385 - RNA, 18 nt, Artificial Sequence
  Synthetic
ggggauacggggagagug

SEQ ID NO: 3386 - RNA, 19 nt, Artificial Sequence
  Synthetic
aggggauacggggagagug

SEQ ID NO: 3387 - RNA, 20 nt, Artificial Sequence
  Synthetic
uaggggauacggggagagug

SEQ ID NO: 3388 - RNA, 21 nt, Artificial Sequence
  Synthetic
auaggggauacggggagagug

SEQ ID NO: 3389 - RNA, 22 nt, Artificial Sequence
  Synthetic
gauaggggauacggggagagug

SEQ ID NO: 3390 - RNA, 23 nt, Artificial Sequence
  Synthetic
ggauaggggauacggggagagug

SEQ ID NO: 3391 - RNA, 24 nt, Artificial Sequence
  Synthetic
gggauaggggauacggggagagug

SEQ ID NO: 3392 - RNA, 18 nt, Artificial Sequence
  Synthetic
gaacaauaauauugggug

SEQ ID NO: 3393 - RNA, 19 nt, Artificial Sequence
  Synthetic
agaacaauaauauugggug

SEQ ID NO: 3394 - RNA, 20 nt, Artificial Sequence
  Synthetic
gagaacaauaauauugggug

SEQ ID NO: 3395 - RNA, 21 nt, Artificial Sequence
  Synthetic
agagaacaauaauauugggug

SEQ ID NO: 3396 - RNA, 22 nt, Artificial Sequence
  Synthetic
cagagaacaauaauauugggug

SEQ ID NO: 3397 - RNA, 23 nt, Artificial Sequence
  Synthetic
acagagaacaauaauauugggug

SEQ ID NO: 3398 - RNA, 24 nt, Artificial Sequence
  Synthetic
uacagagaacaauaauauugggug

SEQ ID NO: 3399 - RNA, 18 nt, Artificial Sequence
  Synthetic
ggguggugagcaucugug

SEQ ID NO: 3400 - RNA, 19 nt, Artificial Sequence
  Synthetic
uggguggugagcaucugug

SEQ ID NO: 3401 - RNA, 20 nt, Artificial Sequence
  Synthetic
uuggguggugagcaucugug

SEQ ID NO: 3402 - RNA, 21 nt, Artificial Sequence
  Synthetic
auuggguggugagcaucugug

SEQ ID NO: 3403 - RNA, 22 nt, Artificial Sequence
  Synthetic
uauuggguggugagcaucugug

SEQ ID NO: 3404 - RNA, 23 nt, Artificial Sequence
  Synthetic
auauuggguggugagcaucugug

SEQ ID NO: 3405 - RNA, 24 nt, Artificial Sequence
  Synthetic
aauauuggguggugagcaucugug

SEQ ID NO: 3406 - RNA, 18 nt, Artificial Sequence
  Synthetic
ucucaaaagaaagauuug

SEQ ID NO: 3407 - RNA, 19 nt, Artificial Sequence
  Synthetic
cucucaaaagaaagauuug

SEQ ID NO: 3408 - RNA, 20 nt, Artificial Sequence
  Synthetic
ccucucaaaagaaagauuug

SEQ ID NO: 3409 - RNA, 21 nt, Artificial Sequence
  Synthetic
accucucaaaagaaagauuug

SEQ ID NO: 3410 - RNA, 22 nt, Artificial Sequence
  Synthetic
uaccucucaaaagaaagauuug

SEQ ID NO: 3411 - RNA, 23 nt, Artificial Sequence
  Synthetic
uuaccucucaaaagaaagauuug

SEQ ID NO: 3412 - RNA, 24 nt, Artificial Sequence
  Synthetic
cuuaccucucaaaagaaagauuug

SEQ ID NO: 3413 - RNA, 18 nt, Artificial Sequence
  Synthetic
aauuucuuuuacuaaaau

SEQ ID NO: 3414 - RNA, 19 nt, Artificial Sequence
  Synthetic
uaauuucuuuuacuaaaau

SEQ ID NO: 3415 - RNA, 20 nt, Artificial Sequence
  Synthetic
guaauuucuuuuacuaaaau

SEQ ID NO: 3416 - RNA, 21 nt, Artificial Sequence
  Synthetic
aguaauuucuuuuacuaaaau

SEQ ID NO: 3417 - RNA, 22 nt, Artificial Sequence
  Synthetic
uaguaauuucuuuuacuaaaau

SEQ ID NO: 3418 - RNA, 23 nt, Artificial Sequence
  Synthetic
auaguaauuucuuuuacuaaaau

SEQ ID NO: 3419 - RNA, 24 nt, Artificial Sequence
  Synthetic
gauaguaauuucuuuuacuaaaau

SEQ ID NO: 3420 - RNA, 18 nt, Artificial Sequence
  Synthetic
aggggacacaggguuaau

SEQ ID NO: 3421 - RNA, 19 nt, Artificial Sequence
  Synthetic
aaggggacacaggguuaau

SEQ ID NO: 3422 - RNA, 20 nt, Artificial Sequence
  Synthetic
aaaggggacacaggguuaau

SEQ ID NO: 3423 - RNA, 21 nt, Artificial Sequence
  Synthetic
aaaaggggacacaggguuaau

SEQ ID NO: 3424 - RNA, 22 nt, Artificial Sequence
  Synthetic
aaaaaggggacacaggguuaau

SEQ ID NO: 3425 - RNA, 23 nt, Artificial Sequence
  Synthetic
gaaaaaggggacacaggguuaau

SEQ ID NO: 3426 - RNA, 24 nt, Artificial Sequence
  Synthetic
agaaaaaggggacacaggguuaau

SEQ ID NO: 3427 - RNA, 18 nt, Artificial Sequence
  Synthetic
aaauauaaucuuuaagau

SEQ ID NO: 3428 - RNA, 19 nt, Artificial Sequence
  Synthetic
aaaauauaaucuuuaagau

SEQ ID NO: 3429 - RNA, 20 nt, Artificial Sequence
  Synthetic
uaaaauauaaucuuuaagau

SEQ ID NO: 3430 - RNA, 21 nt, Artificial Sequence
  Synthetic
uuaaaauauaaucuuuaagau

SEQ ID NO: 3431 - RNA, 22 nt, Artificial Sequence
  Synthetic
cuuaaaauauaaucuuuaagau

SEQ ID NO: 3432 - RNA, 23 nt, Artificial Sequence
  Synthetic
ucuuaaaauauaaucuuuaagau

SEQ ID NO: 3433 - RNA, 24 nt, Artificial Sequence
  Synthetic
aucuuaaaauauaaucuuuaagau

SEQ ID NO: 3434 - RNA, 18 nt, Artificial Sequence
  Synthetic
uggggugggauaggggau

SEQ ID NO: 3435 - RNA, 19 nt, Artificial Sequence
  Synthetic
uuggggugggauaggggau

SEQ ID NO: 3436 - RNA, 20 nt, Artificial Sequence
  Synthetic
guuggggugggauaggggau

SEQ ID NO: 3437 - RNA, 21 nt, Artificial Sequence
  Synthetic
gguuggggugggauaggggau

SEQ ID NO: 3438 - RNA, 22 nt, Artificial Sequence
  Synthetic
ggguuggggugggauaggggau

SEQ ID NO: 3439 - RNA, 23 nt, Artificial Sequence
  Synthetic
gggguuggggugggauaggggau

SEQ ID NO: 3440 - RNA, 24 nt, Artificial Sequence
  Synthetic
ggggguuggggugggauaggggau

SEQ ID NO: 3441 - RNA, 18 nt, Artificial Sequence
  Synthetic
uggggguuggggugggau

SEQ ID NO: 3442 - RNA, 19 nt, Artificial Sequence
  Synthetic
guggggguuggggugggau

SEQ ID NO: 3443 - RNA, 20 nt, Artificial Sequence
  Synthetic
uguggggguuggggugggau

SEQ ID NO: 3444 - RNA, 21 nt, Artificial Sequence
  Synthetic
guguggggguuggggugggau

SEQ ID NO: 3445 - RNA, 22 nt, Artificial Sequence
  Synthetic
uguguggggguuggggugggau

SEQ ID NO: 3446 - RNA, 23 nt, Artificial Sequence
  Synthetic
cuguguggggguuggggugggau

SEQ ID NO: 3447 - RNA, 24 nt, Artificial Sequence
  Synthetic
ucuguguggggguuggggugggau

SEQ ID NO: 3448 - RNA, 18 nt, Artificial Sequence
  Synthetic
gaaaucuuaucuucugcu

SEQ ID NO: 3449 - RNA, 19 nt, Artificial Sequence
  Synthetic
ugaaaucuuaucuucugcu

SEQ ID NO: 3450 - RNA, 20 nt, Artificial Sequence
  Synthetic
uugaaaucuuaucuucugcu

SEQ ID NO: 3451 - RNA, 21 nt, Artificial Sequence
  Synthetic
cuugaaaucuuaucuucugcu

SEQ ID NO: 3452 - RNA, 22 nt, Artificial Sequence
  Synthetic
ucuugaaaucuuaucuucugcu

SEQ ID NO: 3453 - RNA, 23 nt, Artificial Sequence
  Synthetic
aucuugaaaucuuaucuucugcu

SEQ ID NO: 3454 - RNA, 24 nt, Artificial Sequence
  Synthetic
aaucuugaaaucuuaucuucugcu

SEQ ID NO: 3455 - RNA, 18 nt, Artificial Sequence
  Synthetic
uaaggaaagggucacagu

SEQ ID NO: 3456 - RNA, 19 nt, Artificial Sequence
  Synthetic
auaaggaaagggucacagu

SEQ ID NO: 3457 - RNA, 20 nt, Artificial Sequence
  Synthetic
gauaaggaaagggucacagu

SEQ ID NO: 3458 - RNA, 21 nt, Artificial Sequence
  Synthetic
agauaaggaaagggucacagu

SEQ ID NO: 3459 - RNA, 22 nt, Artificial Sequence
  Synthetic
aagauaaggaaagggucacagu

SEQ ID NO: 3460 - RNA, 23 nt, Artificial Sequence
  Synthetic
uaagauaaggaaagggucacagu

SEQ ID NO: 3461 - RNA, 24 nt, Artificial Sequence
  Synthetic
uuaagauaaggaaagggucacagu

SEQ ID NO: 3462 - RNA, 18 nt, Artificial Sequence
  Synthetic
aaaacaaaauaauccagu

SEQ ID NO: 3463 - RNA, 19 nt, Artificial Sequence
  Synthetic
aaaaacaaaauaauccagu

SEQ ID NO: 3464 - RNA, 20 nt, Artificial Sequence
  Synthetic
caaaaacaaaauaauccagu

SEQ ID NO: 3465 - RNA, 21 nt, Artificial Sequence
  Synthetic
acaaaaacaaaauaauccagu

SEQ ID NO: 3466 - RNA, 22 nt, Artificial Sequence
  Synthetic
aacaaaaacaaaauaauccagu

SEQ ID NO: 3467 - RNA, 23 nt, Artificial Sequence
  Synthetic
gaacaaaaacaaaauaauccagu

SEQ ID NO: 3468 - RNA, 24 nt, Artificial Sequence
  Synthetic
agaacaaaaacaaaauaauccagu

SEQ ID NO: 3469 - RNA, 18 nt, Artificial Sequence
  Synthetic
uggguggugagcaucugu

SEQ ID NO: 3470 - RNA, 19 nt, Artificial Sequence
  Synthetic
uuggguggugagcaucugu

SEQ ID NO: 3471 - RNA, 20 nt, Artificial Sequence
  Synthetic
auuggguggugagcaucugu

SEQ ID NO: 3472 - RNA, 21 nt, Artificial Sequence
  Synthetic
uauuggguggugagcaucugu

SEQ ID NO: 3473 - RNA, 22 nt, Artificial Sequence
  Synthetic
auauuggguggugagcaucugu

SEQ ID NO: 3474 - RNA, 23 nt, Artificial Sequence
  Synthetic
aauauuggguggugagcaucugu

SEQ ID NO: 3475 - RNA, 24 nt, Artificial Sequence
  Synthetic
uaauauuggguggugagcaucugu

SEQ ID NO: 3476 - RNA, 18 nt, Artificial Sequence
  Synthetic
uggccuguuaguuagcuu

SEQ ID NO: 3477 - RNA, 19 nt, Artificial Sequence
  Synthetic
uuggccuguuaguuagcuu

SEQ ID NO: 3478 - RNA, 20 nt, Artificial Sequence
  Synthetic
cuuggccuguuaguuagcuu

SEQ ID NO: 3479 - RNA, 21 nt, Artificial Sequence
  Synthetic
gcuuggccuguuaguuagcuu

SEQ ID NO: 3480 - RNA, 22 nt, Artificial Sequence
  Synthetic
ugcuuggccuguuaguuagcuu

SEQ ID NO: 3481 - RNA, 23 nt, Artificial Sequence
  Synthetic
cugcuuggccuguuaguuagcuu

SEQ ID NO: 3482 - RNA, 24 nt, Artificial Sequence
  Synthetic
gcugcuuggccuguuaguuagcuu

SEQ ID NO: 3483 - RNA, 18 nt, Artificial Sequence
  Synthetic
gggcaacaaaauagugaa

SEQ ID NO: 3484 - RNA, 19 nt, Artificial Sequence
  Synthetic
agggcaacaaaauagugaa

SEQ ID NO: 3485 - RNA, 20 nt, Artificial Sequence
  Synthetic
aagggcaacaaaauagugaa

SEQ ID NO: 3486 - RNA, 21 nt, Artificial Sequence
  Synthetic
gaagggcaacaaaauagugaa

SEQ ID NO: 3487 - RNA, 22 nt, Artificial Sequence
  Synthetic
ugaagggcaacaaaauagugaa

SEQ ID NO: 3488 - RNA, 23 nt, Artificial Sequence
  Synthetic
uugaagggcaacaaaauagugaa

SEQ ID NO: 3489 - RNA, 24 nt, Artificial Sequence
  Synthetic
uuugaagggcaacaaaauagugaa

SEQ ID NO: 3490 - RNA, 18 nt, Artificial Sequence
  Synthetic
uuuuaauuuugaaccaua

SEQ ID NO: 3491 - RNA, 19 nt, Artificial Sequence
  Synthetic
uuuuuaauuuugaaccaua

SEQ ID NO: 3492 - RNA, 20 nt, Artificial Sequence
  Synthetic
auuuuuaauuuugaaccaua

SEQ ID NO: 3493 - RNA, 21 nt, Artificial Sequence
  Synthetic
cauuuuuaauuuugaaccaua

SEQ ID NO: 3494 - RNA, 22 nt, Artificial Sequence
  Synthetic
ucauuuuuaauuuugaaccaua

SEQ ID NO: 3495 - RNA, 23 nt, Artificial Sequence
  Synthetic
cucauuuuuaauuuugaaccaua

SEQ ID NO: 3496 - RNA, 24 nt, Artificial Sequence
  Synthetic
gcucauuuuuaauuuugaaccaua

SEQ ID NO: 3497 - RNA, 18 nt, Artificial Sequence
  Synthetic
aaaauccccacuaagauc

SEQ ID NO: 3498 - RNA, 19 nt, Artificial Sequence
  Synthetic
gaaaauccccacuaagauc

SEQ ID NO: 3499 - RNA, 20 nt, Artificial Sequence
  Synthetic
ugaaaauccccacuaagauc

SEQ ID NO: 3500 - RNA, 21 nt, Artificial Sequence
  Synthetic
gugaaaauccccacuaagauc

SEQ ID NO: 3501 - RNA, 22 nt, Artificial Sequence
  Synthetic
agugaaaauccccacuaagauc

SEQ ID NO: 3502 - RNA, 23 nt, Artificial Sequence
  Synthetic
gagugaaaauccccacuaagauc

SEQ ID NO: 3503 - RNA, 24 nt, Artificial Sequence
  Synthetic
agagugaaaauccccacuaagauc

SEQ ID NO: 3504 - RNA, 18 nt, Artificial Sequence
  Synthetic
cuucagauagauuauauc

SEQ ID NO: 3505 - RNA, 19 nt, Artificial Sequence
  Synthetic
gcuucagauagauuauauc

SEQ ID NO: 3506 - RNA, 20 nt, Artificial Sequence
  Synthetic
agcuucagauagauuauauc

SEQ ID NO: 3507 - RNA, 21 nt, Artificial Sequence
  Synthetic
uagcuucagauagauuauauc

SEQ ID NO: 3508 - RNA, 22 nt, Artificial Sequence
  Synthetic
auagcuucagauagauuauauc

SEQ ID NO: 3509 - RNA, 23 nt, Artificial Sequence
  Synthetic
cauagcuucagauagauuauauc

SEQ ID NO: 3510 - RNA, 24 nt, Artificial Sequence
  Synthetic
ucauagcuucagauagauuauauc

SEQ ID NO: 3511 - RNA, 18 nt, Artificial Sequence
  Synthetic
gagggcaucuuguggcuc

SEQ ID NO: 3512 - RNA, 19 nt, Artificial Sequence
  Synthetic
agagggcaucuuguggcuc

SEQ ID NO: 3513 - RNA, 20 nt, Artificial Sequence
  Synthetic
cagagggcaucuuguggcuc

SEQ ID NO: 3514 - RNA, 21 nt, Artificial Sequence
  Synthetic
ccagagggcaucuuguggcuc

SEQ ID NO: 3515 - RNA, 22 nt, Artificial Sequence
  Synthetic
cccagagggcaucuuguggcuc

SEQ ID NO: 3516 - RNA, 23 nt, Artificial Sequence
  Synthetic
gcccagagggcaucuuguggcuc

SEQ ID NO: 3517 - RNA, 24 nt, Artificial Sequence
  Synthetic
agcccagagggcaucuuguggcuc

SEQ ID NO: 3518 - RNA, 18 nt, Artificial Sequence
  Synthetic
uuucgucugccaccacag

SEQ ID NO: 3519 - RNA, 19 nt, Artificial Sequence
  Synthetic
guuucgucugccaccacag

SEQ ID NO: 3520 - RNA, 20 nt, Artificial Sequence
  Synthetic
uguuucgucugccaccacag

SEQ ID NO: 3521 - RNA, 21 nt, Artificial Sequence
  Synthetic
auguuucgucugccaccacag

SEQ ID NO: 3522 - RNA, 22 nt, Artificial Sequence
  Synthetic
aauguuucgucugccaccacag

SEQ ID NO: 3523 - RNA, 23 nt, Artificial Sequence
  Synthetic
aaauguuucgucugccaccacag

SEQ ID NO: 3524 - RNA, 24 nt, Artificial Sequence
  Synthetic
aaaauguuucgucugccaccacag

SEQ ID NO: 3525 - RNA, 18 nt, Artificial Sequence
  Synthetic
uagauuauaucuggagug

SEQ ID NO: 3526 - RNA, 19 nt, Artificial Sequence
  Synthetic
auagauuauaucuggagug

SEQ ID NO: 3527 - RNA, 20 nt, Artificial Sequence
  Synthetic
gauagauuauaucuggagug

SEQ ID NO: 3528 - RNA, 21 nt, Artificial Sequence
  Synthetic
agauagauuauaucuggagug

SEQ ID NO: 3529 - RNA, 22 nt, Artificial Sequence
  Synthetic
cagauagauuauaucuggagug

SEQ ID NO: 3530 - RNA, 23 nt, Artificial Sequence
  Synthetic
ucagauagauuauaucuggagug

SEQ ID NO: 3531 - RNA, 24 nt, Artificial Sequence
  Synthetic
uucagauagauuauaucuggagug

SEQ ID NO: 3532 - RNA, 18 nt, Artificial Sequence
  Synthetic
uuucucuuauuaaacccu

SEQ ID NO: 3533 - RNA, 19 nt, Artificial Sequence
  Synthetic
uuuucucuuauuaaacccu

SEQ ID NO: 3534 - RNA, 20 nt, Artificial Sequence
  Synthetic
auuuucucuuauuaaacccu

SEQ ID NO: 3535 - RNA, 21 nt, Artificial Sequence
  Synthetic
aauuuucucuuauuaaacccu

SEQ ID NO: 3536 - RNA, 22 nt, Artificial Sequence
  Synthetic
gaauuuucucuuauuaaacccu

SEQ ID NO: 3537 - RNA, 23 nt, Artificial Sequence
  Synthetic
agaauuuucucuuauuaaacccu

SEQ ID NO: 3538 - RNA, 24 nt, Artificial Sequence
  Synthetic
gagaauuuucucuuauuaaacccu

SEQ ID NO: 3539 - RNA, 18 nt, Artificial Sequence
  Synthetic
aguucagcugcucuagcu

SEQ ID NO: 3540 - RNA, 19 nt, Artificial Sequence
  Synthetic
aaguucagcugcucuagcu

SEQ ID NO: 3541 - RNA, 20 nt, Artificial Sequence
  Synthetic
uaaguucagcugcucuagcu

SEQ ID NO: 3542 - RNA, 21 nt, Artificial Sequence
  Synthetic
uuaaguucagcugcucuagcu

SEQ ID NO: 3543 - RNA, 22 nt, Artificial Sequence
  Synthetic
uuuaaguucagcugcucuagcu

SEQ ID NO: 3544 - RNA, 23 nt, Artificial Sequence
  Synthetic
auuuaaguucagcugcucuagcu

SEQ ID NO: 3545 - RNA, 24 nt, Artificial Sequence
  Synthetic
uauuuaaguucagcugcucuagcu

SEQ ID NO: 3546 - RNA, 18 nt, Artificial Sequence
  Synthetic
cuauguaucuggcauagu

SEQ ID NO: 3547 - RNA, 19 nt, Artificial Sequence
  Synthetic
ccuauguaucuggcauagu

SEQ ID NO: 3548 - RNA, 20 nt, Artificial Sequence
  Synthetic
accuauguaucuggcauagu

SEQ ID NO: 3549 - RNA, 21 nt, Artificial Sequence
  Synthetic
caccuauguaucuggcauagu

SEQ ID NO: 3550 - RNA, 22 nt, Artificial Sequence
  Synthetic
ccaccuauguaucuggcauagu

SEQ ID NO: 3551 - RNA, 23 nt, Artificial Sequence
  Synthetic
gccaccuauguaucuggcauagu

SEQ ID NO: 3552 - RNA, 24 nt, Artificial Sequence
  Synthetic
ugccaccuauguaucuggcauagu

SEQ ID NO: 3553 - RNA, 18 nt, Artificial Sequence
  Synthetic
uucugaguugccacaauu

SEQ ID NO: 3554 - RNA, 19 nt, Artificial Sequence
  Synthetic
uuucugaguugccacaauu

SEQ ID NO: 3555 - RNA, 20 nt, Artificial Sequence
  Synthetic
guuucugaguugccacaauu

SEQ ID NO: 3556 - RNA, 21 nt, Artificial Sequence
  Synthetic
aguuucugaguugccacaauu

SEQ ID NO: 3557 - RNA, 22 nt, Artificial Sequence
  Synthetic
uaguuucugaguugccacaauu

SEQ ID NO: 3558 - RNA, 23 nt, Artificial Sequence
  Synthetic
guaguuucugaguugccacaauu

SEQ ID NO: 3559 - RNA, 24 nt, Artificial Sequence
  Synthetic
uguaguuucugaguugccacaauu

SEQ ID NO: 3560 - RNA, 18 nt, Artificial Sequence
  Synthetic
agaugaaugucaugcauu

SEQ ID NO: 3561 - RNA, 19 nt, Artificial Sequence
  Synthetic
cagaugaaugucaugcauu

SEQ ID NO: 3562 - RNA, 20 nt, Artificial Sequence
  Synthetic
acagaugaaugucaugcauu

SEQ ID NO: 3563 - RNA, 21 nt, Artificial Sequence
  Synthetic
cacagaugaaugucaugcauu

SEQ ID NO: 3564 - RNA, 22 nt, Artificial Sequence
  Synthetic
ccacagaugaaugucaugcauu

SEQ ID NO: 3565 - RNA, 23 nt, Artificial Sequence
  Synthetic
accacagaugaaugucaugcauu

SEQ ID NO: 3566 - RNA, 24 nt, Artificial Sequence
  Synthetic
caccacagaugaaugucaugcauu

SEQ ID NO: 3567 - RNA, 18 nt, Artificial Sequence
  Synthetic
gcacguaauuuugcuguu

SEQ ID NO: 3568 - RNA, 19 nt, Artificial Sequence
  Synthetic
ggcacguaauuuugcuguu

SEQ ID NO: 3569 - RNA, 20 nt, Artificial Sequence
  Synthetic
gggcacguaauuuugcuguu

SEQ ID NO: 3570 - RNA, 21 nt, Artificial Sequence
  Synthetic
ggggcacguaauuuugcuguu

SEQ ID NO: 3571 - RNA, 22 nt, Artificial Sequence
  Synthetic
gggggcacguaauuuugcuguu

SEQ ID NO: 3572 - RNA, 23 nt, Artificial Sequence
  Synthetic
ugggggcacguaauuuugcuguu

SEQ ID NO: 3573 - RNA, 24 nt, Artificial Sequence
  Synthetic
uugggggcacguaauuuugcuguu

SEQ ID NO: 3574 - RNA, 18 nt, Artificial Sequence
  Synthetic
aguuuguguuuguaguuu

SEQ ID NO: 3575 - RNA, 19 nt, Artificial Sequence
  Synthetic
aaguuuguguuuguaguuu

SEQ ID NO: 3576 - RNA, 20 nt, Artificial Sequence
  Synthetic
gaaguuuguguuuguaguuu

SEQ ID NO: 3577 - RNA, 21 nt, Artificial Sequence
  Synthetic
ugaaguuuguguuuguaguuu

SEQ ID NO: 3578 - RNA, 22 nt, Artificial Sequence
  Synthetic
gugaaguuuguguuuguaguuu

SEQ ID NO: 3579 - RNA, 23 nt, Artificial Sequence
  Synthetic
ugugaaguuuguguuuguaguuu

SEQ ID NO: 3580 - RNA, 24 nt, Artificial Sequence
  Synthetic
cugugaaguuuguguuuguaguuu

SEQ ID NO: 3581 - RNA, 18 nt, Artificial Sequence
  Synthetic
ugccuagucuaaggugca

SEQ ID NO: 3582 - RNA, 19 nt, Artificial Sequence
  Synthetic
cugccuagucuaaggugca

SEQ ID NO: 3583 - RNA, 20 nt, Artificial Sequence
  Synthetic
gcugccuagucuaaggugca

SEQ ID NO: 3584 - RNA, 21 nt, Artificial Sequence
  Synthetic
agcugccuagucuaaggugca

SEQ ID NO: 3585 - RNA, 22 nt, Artificial Sequence
  Synthetic
cagcugccuagucuaaggugca

SEQ ID NO: 3586 - RNA, 23 nt, Artificial Sequence
  Synthetic
ucagcugccuagucuaaggugca

SEQ ID NO: 3587 - RNA, 24 nt, Artificial Sequence
  Synthetic
cucagcugccuagucuaaggugca

SEQ ID NO: 3588 - RNA, 18 nt, Artificial Sequence
  Synthetic
cagggaguuugagacuca

SEQ ID NO: 3589 - RNA, 19 nt, Artificial Sequence
  Synthetic
gcagggaguuugagacuca

SEQ ID NO: 3590 - RNA, 20 nt, Artificial Sequence
  Synthetic
ugcagggaguuugagacuca

SEQ ID NO: 3591 - RNA, 21 nt, Artificial Sequence
  Synthetic
gugcagggaguuugagacuca

SEQ ID NO: 3592 - RNA, 22 nt, Artificial Sequence
  Synthetic
ggugcagggaguuugagacuca

SEQ ID NO: 3593 - RNA, 23 nt, Artificial Sequence
  Synthetic
aggugcagggaguuugagacuca

SEQ ID NO: 3594 - RNA, 24 nt, Artificial Sequence
  Synthetic
aaggugcagggaguuugagacuca

SEQ ID NO: 3595 - RNA, 18 nt, Artificial Sequence
  Synthetic
cccaucuuuuucuggacc

SEQ ID NO: 3596 - RNA, 19 nt, Artificial Sequence
  Synthetic
ucccaucuuuuucuggacc

SEQ ID NO: 3597 - RNA, 20 nt, Artificial Sequence
  Synthetic
uucccaucuuuuucuggacc

SEQ ID NO: 3598 - RNA, 21 nt, Artificial Sequence
  Synthetic
uuucccaucuuuuucuggacc

SEQ ID NO: 3599 - RNA, 22 nt, Artificial Sequence
  Synthetic
guuucccaucuuuuucuggacc

SEQ ID NO: 3600 - RNA, 23 nt, Artificial Sequence
  Synthetic
gguuucccaucuuuuucuggacc

SEQ ID NO: 3601 - RNA, 24 nt, Artificial Sequence
  Synthetic
agguuucccaucuuuuucuggacc

SEQ ID NO: 3602 - RNA, 18 nt, Artificial Sequence
  Synthetic
uuauaagacuaaacuacc

SEQ ID NO: 3603 - RNA, 19 nt, Artificial Sequence
  Synthetic
guuauaagacuaaacuacc

SEQ ID NO: 3604 - RNA, 20 nt, Artificial Sequence
  Synthetic
gguuauaagacuaaacuacc

SEQ ID NO: 3605 - RNA, 21 nt, Artificial Sequence
  Synthetic
ugguuauaagacuaaacuacc

SEQ ID NO: 3606 - RNA, 22 nt, Artificial Sequence
  Synthetic
cugguuauaagacuaaacuacc

SEQ ID NO: 3607 - RNA, 23 nt, Artificial Sequence
  Synthetic
gcugguuauaagacuaaacuacc

SEQ ID NO: 3608 - RNA, 24 nt, Artificial Sequence
  Synthetic
agcugguuauaagacuaaacuacc

SEQ ID NO: 3609 - RNA, 18 nt, Artificial Sequence
  Synthetic
aguuuuaacuaugggcuc

SEQ ID NO: 3610 - RNA, 19 nt, Artificial Sequence
  Synthetic
gaguuuuaacuaugggcuc

SEQ ID NO: 3611 - RNA, 20 nt, Artificial Sequence
  Synthetic
agaguuuuaacuaugggcuc

SEQ ID NO: 3612 - RNA, 21 nt, Artificial Sequence
  Synthetic
aagaguuuuaacuaugggcuc

SEQ ID NO: 3613 - RNA, 22 nt, Artificial Sequence
  Synthetic
aaagaguuuuaacuaugggcuc

SEQ ID NO: 3614 - RNA, 23 nt, Artificial Sequence
  Synthetic
uaaagaguuuuaacuaugggcuc

SEQ ID NO: 3615 - RNA, 24 nt, Artificial Sequence
  Synthetic
cuaaagaguuuuaacuaugggcuc

SEQ ID NO: 3616 - RNA, 18 nt, Artificial Sequence
  Synthetic
cuuccgugaccuuggcuc

SEQ ID NO: 3617 - RNA, 19 nt, Artificial Sequence
  Synthetic
gcuuccgugaccuuggcuc

SEQ ID NO: 3618 - RNA, 20 nt, Artificial Sequence
  Synthetic
ggcuuccgugaccuuggcuc

SEQ ID NO: 3619 - RNA, 21 nt, Artificial Sequence
  Synthetic
gggcuuccgugaccuuggcuc

SEQ ID NO: 3620 - RNA, 22 nt, Artificial Sequence
  Synthetic
ugggcuuccgugaccuuggcuc

SEQ ID NO: 3621 - RNA, 23 nt, Artificial Sequence
  Synthetic
cugggcuuccgugaccuuggcuc

SEQ ID NO: 3622 - RNA, 24 nt, Artificial Sequence
  Synthetic
ucugggcuuccgugaccuuggcuc

SEQ ID NO: 3623 - RNA, 18 nt, Artificial Sequence
  Synthetic
uuuuuauuauauuauuuc

SEQ ID NO: 3624 - RNA, 19 nt, Artificial Sequence
  Synthetic
uuuuuuauuauauuauuuc

SEQ ID NO: 3625 - RNA, 20 nt, Artificial Sequence
  Synthetic
auuuuuuauuauauuauuuc

SEQ ID NO: 3626 - RNA, 21 nt, Artificial Sequence
  Synthetic
cauuuuuuauuauauuauuuc

SEQ ID NO: 3627 - RNA, 22 nt, Artificial Sequence
  Synthetic
acauuuuuuauuauauuauuuc

SEQ ID NO: 3628 - RNA, 23 nt, Artificial Sequence
  Synthetic
aacauuuuuuauuauauuauuuc

SEQ ID NO: 3629 - RNA, 24 nt, Artificial Sequence
  Synthetic
aaacauuuuuuauuauauuauuuc

SEQ ID NO: 3630 - RNA, 18 nt, Artificial Sequence
  Synthetic
ugccagauacauaggugg

SEQ ID NO: 3631 - RNA, 19 nt, Artificial Sequence
  Synthetic
augccagauacauaggugg

SEQ ID NO: 3632 - RNA, 20 nt, Artificial Sequence
  Synthetic
uaugccagauacauaggugg

SEQ ID NO: 3633 - RNA, 21 nt, Artificial Sequence
  Synthetic
cuaugccagauacauaggugg

SEQ ID NO: 3634 - RNA, 22 nt, Artificial Sequence
  Synthetic
acuaugccagauacauaggugg

SEQ ID NO: 3635 - RNA, 23 nt, Artificial Sequence
  Synthetic
cacuaugccagauacauaggugg

SEQ ID NO: 3636 - RNA, 24 nt, Artificial Sequence
  Synthetic
acacuaugccagauacauaggugg

SEQ ID NO: 3637 - RNA, 18 nt, Artificial Sequence
  Synthetic
uggacccaggaucuuagu

SEQ ID NO: 3638 - RNA, 19 nt, Artificial Sequence
  Synthetic
cuggacccaggaucuuagu

SEQ ID NO: 3639 - RNA, 20 nt, Artificial Sequence
  Synthetic
ucuggacccaggaucuuagu

SEQ ID NO: 3640 - RNA, 21 nt, Artificial Sequence
  Synthetic
uucuggacccaggaucuuagu

SEQ ID NO: 3641 - RNA, 22 nt, Artificial Sequence
  Synthetic
uuucuggacccaggaucuuagu

SEQ ID NO: 3642 - RNA, 23 nt, Artificial Sequence
  Synthetic
uuuucuggacccaggaucuuagu

SEQ ID NO: 3643 - RNA, 24 nt, Artificial Sequence
  Synthetic
uuuuucuggacccaggaucuuagu

SEQ ID NO: 3644 - RNA, 18 nt, Artificial Sequence
  Synthetic
aaacuucacagaaaaugu

SEQ ID NO: 3645 - RNA, 19 nt, Artificial Sequence
  Synthetic
caaacuucacagaaaaugu

SEQ ID NO: 3646 - RNA, 20 nt, Artificial Sequence
  Synthetic
acaaacuucacagaaaaugu

SEQ ID NO: 3647 - RNA, 21 nt, Artificial Sequence
  Synthetic
cacaaacuucacagaaaaugu

SEQ ID NO: 3648 - RNA, 22 nt, Artificial Sequence
  Synthetic
acacaaacuucacagaaaaugu

SEQ ID NO: 3649 - RNA, 23 nt, Artificial Sequence
  Synthetic
aacacaaacuucacagaaaaugu

SEQ ID NO: 3650 - RNA, 24 nt, Artificial Sequence
  Synthetic
aaacacaaacuucacagaaaaugu

SEQ ID NO: 3651 - RNA, 18 nt, Artificial Sequence
  Synthetic
uggaggaaaaagaaaaaa

SEQ ID NO: 3652 - RNA, 19 nt, Artificial Sequence
  Synthetic
cuggaggaaaaagaaaaaa

SEQ ID NO: 3653 - RNA, 20 nt, Artificial Sequence
  Synthetic
ucuggaggaaaaagaaaaaa

SEQ ID NO: 3654 - RNA, 21 nt, Artificial Sequence
  Synthetic
gucuggaggaaaaagaaaaaa

SEQ ID NO: 3655 - RNA, 22 nt, Artificial Sequence
  Synthetic
ugucuggaggaaaaagaaaaaa

SEQ ID NO: 3656 - RNA, 23 nt, Artificial Sequence
  Synthetic
uugucuggaggaaaaagaaaaaa

SEQ ID NO: 3657 - RNA, 24 nt, Artificial Sequence
  Synthetic
cuugucuggaggaaaaagaaaaaa

SEQ ID NO: 3658 - RNA, 18 nt, Artificial Sequence
  Synthetic
ucuggaggaaaaagaaaa

SEQ ID NO: 3659 - RNA, 19 nt, Artificial Sequence
  Synthetic
gucuggaggaaaaagaaaa

SEQ ID NO: 3660 - RNA, 20 nt, Artificial Sequence
  Synthetic
ugucuggaggaaaaagaaaa

SEQ ID NO: 3661 - RNA, 21 nt, Artificial Sequence
  Synthetic
uugucuggaggaaaaagaaaa

SEQ ID NO: 3662 - RNA, 22 nt, Artificial Sequence
  Synthetic
cuugucuggaggaaaaagaaaa

SEQ ID NO: 3663 - RNA, 23 nt, Artificial Sequence
  Synthetic
ucuugucuggaggaaaaagaaaa

SEQ ID NO: 3664 - RNA, 24 nt, Artificial Sequence
  Synthetic
cucuugucuggaggaaaaagaaaa

SEQ ID NO: 3665 - RNA, 18 nt, Artificial Sequence
  Synthetic
ccucuugucuggaggaaa

SEQ ID NO: 3666 - RNA, 19 nt, Artificial Sequence
  Synthetic
cccucuugucuggaggaaa

SEQ ID NO: 3667 - RNA, 20 nt, Artificial Sequence
  Synthetic
ucccucuugucuggaggaaa

SEQ ID NO: 3668 - RNA, 21 nt, Artificial Sequence
  Synthetic
uucccucuugucuggaggaaa

SEQ ID NO: 3669 - RNA, 22 nt, Artificial Sequence
  Synthetic
cuucccucuugucuggaggaaa

SEQ ID NO: 3670 - RNA, 23 nt, Artificial Sequence
  Synthetic
gcuucccucuugucuggaggaaa

SEQ ID NO: 3671 - RNA, 24 nt, Artificial Sequence
  Synthetic
ggcuucccucuugucuggaggaaa

SEQ ID NO: 3672 - RNA, 18 nt, Artificial Sequence
  Synthetic
gaugucaccaaccgccaa

SEQ ID NO: 3673 - RNA, 19 nt, Artificial Sequence
  Synthetic
agaugucaccaaccgccaa

SEQ ID NO: 3674 - RNA, 20 nt, Artificial Sequence
  Synthetic
cagaugucaccaaccgccaa

SEQ ID NO: 3675 - RNA, 21 nt, Artificial Sequence
  Synthetic
ucagaugucaccaaccgccaa

SEQ ID NO: 3676 - RNA, 22 nt, Artificial Sequence
  Synthetic
uucagaugucaccaaccgccaa

SEQ ID NO: 3677 - RNA, 23 nt, Artificial Sequence
  Synthetic
uuucagaugucaccaaccgccaa

SEQ ID NO: 3678 - RNA, 24 nt, Artificial Sequence
  Synthetic
uuuucagaugucaccaaccgccaa

SEQ ID NO: 3679 - RNA, 18 nt, Artificial Sequence
  Synthetic
caaggucacggaagccca

SEQ ID NO: 3680 - RNA, 19 nt, Artificial Sequence
  Synthetic
ccaaggucacggaagccca

SEQ ID NO: 3681 - RNA, 20 nt, Artificial Sequence
  Synthetic
gccaaggucacggaagccca

SEQ ID NO: 3682 - RNA, 21 nt, Artificial Sequence
  Synthetic
agccaaggucacggaagccca

SEQ ID NO: 3683 - RNA, 22 nt, Artificial Sequence
  Synthetic
gagccaaggucacggaagccca

SEQ ID NO: 3684 - RNA, 23 nt, Artificial Sequence
  Synthetic
agagccaaggucacggaagccca

SEQ ID NO: 3685 - RNA, 24 nt, Artificial Sequence
  Synthetic
uagagccaaggucacggaagccca

SEQ ID NO: 3686 - RNA, 18 nt, Artificial Sequence
  Synthetic
auucuagagccaagguca

SEQ ID NO: 3687 - RNA, 19 nt, Artificial Sequence
  Synthetic
uauucuagagccaagguca

SEQ ID NO: 3688 - RNA, 20 nt, Artificial Sequence
  Synthetic
uuauucuagagccaagguca

SEQ ID NO: 3689 - RNA, 21 nt, Artificial Sequence
  Synthetic
uuuauucuagagccaagguca

SEQ ID NO: 3690 - RNA, 22 nt, Artificial Sequence
  Synthetic
uuuuauucuagagccaagguca

SEQ ID NO: 3691 - RNA, 23 nt, Artificial Sequence
  Synthetic
uuuuuauucuagagccaagguca

SEQ ID NO: 3692 - RNA, 24 nt, Artificial Sequence
  Synthetic
cuuuuuauucuagagccaagguca

SEQ ID NO: 3693 - RNA, 18 nt, Artificial Sequence
  Synthetic
ccuggguccagaaaaaga

SEQ ID NO: 3694 - RNA, 19 nt, Artificial Sequence
  Synthetic
uccuggguccagaaaaaga

SEQ ID NO: 3695 - RNA, 20 nt, Artificial Sequence
  Synthetic
auccuggguccagaaaaaga

SEQ ID NO: 3696 - RNA, 21 nt, Artificial Sequence
  Synthetic
gauccuggguccagaaaaaga

SEQ ID NO: 3697 - RNA, 22 nt, Artificial Sequence
  Synthetic
agauccuggguccagaaaaaga

SEQ ID NO: 3698 - RNA, 23 nt, Artificial Sequence
  Synthetic
aagauccuggguccagaaaaaga

SEQ ID NO: 3699 - RNA, 24 nt, Artificial Sequence
  Synthetic
uaagauccuggguccagaaaaaga

SEQ ID NO: 3700 - RNA, 18 nt, Artificial Sequence
  Synthetic
aacaaaauagugaacaga

SEQ ID NO: 3701 - RNA, 19 nt, Artificial Sequence
  Synthetic
caacaaaauagugaacaga

SEQ ID NO: 3702 - RNA, 20 nt, Artificial Sequence
  Synthetic
gcaacaaaauagugaacaga

SEQ ID NO: 3703 - RNA, 21 nt, Artificial Sequence
  Synthetic
ggcaacaaaauagugaacaga

SEQ ID NO: 3704 - RNA, 22 nt, Artificial Sequence
  Synthetic
gggcaacaaaauagugaacaga

SEQ ID NO: 3705 - RNA, 23 nt, Artificial Sequence
  Synthetic
agggcaacaaaauagugaacaga

SEQ ID NO: 3706 - RNA, 24 nt, Artificial Sequence
  Synthetic
aagggcaacaaaauagugaacaga

SEQ ID NO: 3707 - RNA, 18 nt, Artificial Sequence
  Synthetic
agauagauuauaucugga

SEQ ID NO: 3708 - RNA, 19 nt, Artificial Sequence
  Synthetic
cagauagauuauaucugga

SEQ ID NO: 3709 - RNA, 20 nt, Artificial Sequence
  Synthetic
ucagauagauuauaucugga

SEQ ID NO: 3710 - RNA, 21 nt, Artificial Sequence
  Synthetic
uucagauagauuauaucugga

SEQ ID NO: 3711 - RNA, 22 nt, Artificial Sequence
  Synthetic
cuucagauagauuauaucugga

SEQ ID NO: 3712 - RNA, 23 nt, Artificial Sequence
  Synthetic
gcuucagauagauuauaucugga

SEQ ID NO: 3713 - RNA, 24 nt, Artificial Sequence
  Synthetic
agcuucagauagauuauaucugga

SEQ ID NO: 3714 - RNA, 18 nt, Artificial Sequence
  Synthetic
cuuagacuaggcagcuga

SEQ ID NO: 3715 - RNA, 19 nt, Artificial Sequence
  Synthetic
ccuuagacuaggcagcuga

SEQ ID NO: 3716 - RNA, 20 nt, Artificial Sequence
  Synthetic
accuuagacuaggcagcuga

SEQ ID NO: 3717 - RNA, 21 nt, Artificial Sequence
  Synthetic
caccuuagacuaggcagcuga

SEQ ID NO: 3718 - RNA, 22 nt, Artificial Sequence
  Synthetic
gcaccuuagacuaggcagcuga

SEQ ID NO: 3719 - RNA, 23 nt, Artificial Sequence
  Synthetic
ugcaccuuagacuaggcagcuga

SEQ ID NO: 3720 - RNA, 24 nt, Artificial Sequence
  Synthetic
cugcaccuuagacuaggcagcuga

SEQ ID NO: 3721 - RNA, 18 nt, Artificial Sequence
  Synthetic
uugaagggcaacaaaaua

SEQ ID NO: 3722 - RNA, 19 nt, Artificial Sequence
  Synthetic
uuugaagggcaacaaaaua

SEQ ID NO: 3723 - RNA, 20 nt, Artificial Sequence
  Synthetic
guuugaagggcaacaaaaua

SEQ ID NO: 3724 - RNA, 21 nt, Artificial Sequence
  Synthetic
gguuugaagggcaacaaaaua

SEQ ID NO: 3725 - RNA, 22 nt, Artificial Sequence
  Synthetic
ugguuugaagggcaacaaaaua

SEQ ID NO: 3726 - RNA, 23 nt, Artificial Sequence
  Synthetic
cugguuugaagggcaacaaaaua

SEQ ID NO: 3727 - RNA, 24 nt, Artificial Sequence
  Synthetic
acugguuugaagggcaacaaaaua

SEQ ID NO: 3728 - RNA, 18 nt, Artificial Sequence
  Synthetic
guauauaguauagucaua

SEQ ID NO: 3729 - RNA, 19 nt, Artificial Sequence
  Synthetic
uguauauaguauagucaua

SEQ ID NO: 3730 - RNA, 20 nt, Artificial Sequence
  Synthetic
cuguauauaguauagucaua

SEQ ID NO: 3731 - RNA, 21 nt, Artificial Sequence
  Synthetic
acuguauauaguauagucaua

SEQ ID NO: 3732 - RNA, 22 nt, Artificial Sequence
  Synthetic
gacuguauauaguauagucaua

SEQ ID NO: 3733 - RNA, 23 nt, Artificial Sequence
  Synthetic
ugacuguauauaguauagucaua

SEQ ID NO: 3734 - RNA, 24 nt, Artificial Sequence
  Synthetic
augacuguauauaguauagucaua

SEQ ID NO: 3735 - RNA, 18 nt, Artificial Sequence
  Synthetic
caugaaacugauauauua

SEQ ID NO: 3736 - RNA, 19 nt, Artificial Sequence
  Synthetic
ccaugaaacugauauauua

SEQ ID NO: 3737 - RNA, 20 nt, Artificial Sequence
  Synthetic
gccaugaaacugauauauua

SEQ ID NO: 3738 - RNA, 21 nt, Artificial Sequence
  Synthetic
ugccaugaaacugauauauua

SEQ ID NO: 3739 - RNA, 22 nt, Artificial Sequence
  Synthetic
gugccaugaaacugauauauua

SEQ ID NO: 3740 - RNA, 23 nt, Artificial Sequence
  Synthetic
ugugccaugaaacugauauauua

SEQ ID NO: 3741 - RNA, 24 nt, Artificial Sequence
  Synthetic
cugugccaugaaacugauauauua

SEQ ID NO: 3742 - RNA, 18 nt, Artificial Sequence
  Synthetic
aguauagucauaaagaac

SEQ ID NO: 3743 - RNA, 19 nt, Artificial Sequence
  Synthetic
uaguauagucauaaagaac

SEQ ID NO: 3744 - RNA, 20 nt, Artificial Sequence
  Synthetic
auaguauagucauaaagaac

SEQ ID NO: 3745 - RNA, 21 nt, Artificial Sequence
  Synthetic
uauaguauagucauaaagaac

SEQ ID NO: 3746 - RNA, 22 nt, Artificial Sequence
  Synthetic
auauaguauagucauaaagaac

SEQ ID NO: 3747 - RNA, 23 nt, Artificial Sequence
  Synthetic
uauauaguauagucauaaagaac

SEQ ID NO: 3748 - RNA, 24 nt, Artificial Sequence
  Synthetic
guauauaguauagucauaaagaac

SEQ ID NO: 3749 - RNA, 18 nt, Artificial Sequence
  Synthetic
cagcucugcugacaauac

SEQ ID NO: 3750 - RNA, 19 nt, Artificial Sequence
  Synthetic
ucagcucugcugacaauac

SEQ ID NO: 3751 - RNA, 20 nt, Artificial Sequence
  Synthetic
cucagcucugcugacaauac

SEQ ID NO: 3752 - RNA, 21 nt, Artificial Sequence
  Synthetic
ucucagcucugcugacaauac

SEQ ID NO: 3753 - RNA, 22 nt, Artificial Sequence
  Synthetic
uucucagcucugcugacaauac

SEQ ID NO: 3754 - RNA, 23 nt, Artificial Sequence
  Synthetic
cuucucagcucugcugacaauac

SEQ ID NO: 3755 - RNA, 24 nt, Artificial Sequence
  Synthetic
ucuucucagcucugcugacaauac

SEQ ID NO: 3756 - RNA, 18 nt, Artificial Sequence
  Synthetic
aaccuguuuagcucaccc

SEQ ID NO: 3757 - RNA, 19 nt, Artificial Sequence
  Synthetic
aaaccuguuuagcucaccc

SEQ ID NO: 3758 - RNA, 20 nt, Artificial Sequence
  Synthetic
gaaaccuguuuagcucaccc

SEQ ID NO: 3759 - RNA, 21 nt, Artificial Sequence
  Synthetic
ggaaaccuguuuagcucaccc

SEQ ID NO: 3760 - RNA, 22 nt, Artificial Sequence
  Synthetic
gggaaaccuguuuagcucaccc

SEQ ID NO: 3761 - RNA, 23 nt, Artificial Sequence
  Synthetic
ugggaaaccuguuuagcucaccc

SEQ ID NO: 3762 - RNA, 24 nt, Artificial Sequence
  Synthetic
augggaaaccuguuuagcucaccc

SEQ ID NO: 3763 - RNA, 18 nt, Artificial Sequence
  Synthetic
gaguugucauacauaccc

SEQ ID NO: 3764 - RNA, 19 nt, Artificial Sequence
  Synthetic
agaguugucauacauaccc

SEQ ID NO: 3765 - RNA, 20 nt, Artificial Sequence
  Synthetic
aagaguugucauacauaccc

SEQ ID NO: 3766 - RNA, 21 nt, Artificial Sequence
  Synthetic
uaagaguugucauacauaccc

SEQ ID NO: 3767 - RNA, 22 nt, Artificial Sequence
  Synthetic
uuaagaguugucauacauaccc

SEQ ID NO: 3768 - RNA, 23 nt, Artificial Sequence
  Synthetic
auuaagaguugucauacauaccc

SEQ ID NO: 3769 - RNA, 24 nt, Artificial Sequence
  Synthetic
aauuaagaguugucauacauaccc

SEQ ID NO: 3770 - RNA, 18 nt, Artificial Sequence
  Synthetic
gcagcugagagaagcccc

SEQ ID NO: 3771 - RNA, 19 nt, Artificial Sequence
  Synthetic
ggcagcugagagaagcccc

SEQ ID NO: 3772 - RNA, 20 nt, Artificial Sequence
  Synthetic
aggcagcugagagaagcccc

SEQ ID NO: 3773 - RNA, 21 nt, Artificial Sequence
  Synthetic
uaggcagcugagagaagcccc

SEQ ID NO: 3774 - RNA, 22 nt, Artificial Sequence
  Synthetic
cuaggcagcugagagaagcccc

SEQ ID NO: 3775 - RNA, 23 nt, Artificial Sequence
  Synthetic
acuaggcagcugagagaagcccc

SEQ ID NO: 3776 - RNA, 24 nt, Artificial Sequence
  Synthetic
gacuaggcagcugagagaagcccc

SEQ ID NO: 3777 - RNA, 18 nt, Artificial Sequence
  Synthetic
gccaaggucacggaagcc

SEQ ID NO: 3778 - RNA, 19 nt, Artificial Sequence
  Synthetic
agccaaggucacggaagcc

SEQ ID NO: 3779 - RNA, 20 nt, Artificial Sequence
  Synthetic
gagccaaggucacggaagcc

SEQ ID NO: 3780 - RNA, 21 nt, Artificial Sequence
  Synthetic
agagccaaggucacggaagcc

SEQ ID NO: 3781 - RNA, 22 nt, Artificial Sequence
  Synthetic
uagagccaaggucacggaagcc

SEQ ID NO: 3782 - RNA, 23 nt, Artificial Sequence
  Synthetic
cuagagccaaggucacggaagcc

SEQ ID NO: 3783 - RNA, 24 nt, Artificial Sequence
  Synthetic
ucuagagccaaggucacggaagcc

SEQ ID NO: 3784 - RNA, 18 nt, Artificial Sequence
  Synthetic
cagaugucaccaaccgcc

SEQ ID NO: 3785 - RNA, 19 nt, Artificial Sequence
  Synthetic
ucagaugucaccaaccgcc

SEQ ID NO: 3786 - RNA, 20 nt, Artificial Sequence
  Synthetic
uucagaugucaccaaccgcc

SEQ ID NO: 3787 - RNA, 21 nt, Artificial Sequence
  Synthetic
uuucagaugucaccaaccgcc

SEQ ID NO: 3788 - RNA, 22 nt, Artificial Sequence
  Synthetic
uuuucagaugucaccaaccgcc

SEQ ID NO: 3789 - RNA, 23 nt, Artificial Sequence
  Synthetic
auuuucagaugucaccaaccgcc

SEQ ID NO: 3790 - RNA, 24 nt, Artificial Sequence
  Synthetic
gauuuucagaugucaccaaccgcc

SEQ ID NO: 3791 - RNA, 18 nt, Artificial Sequence
  Synthetic
uuauauacuaacugugcc

SEQ ID NO: 3792 - RNA, 19 nt, Artificial Sequence
  Synthetic
auuauauacuaacugugcc

SEQ ID NO: 3793 - RNA, 20 nt, Artificial Sequence
  Synthetic
aauuauauacuaacugugcc

SEQ ID NO: 3794 - RNA, 21 nt, Artificial Sequence
  Synthetic
gaauuauauacuaacugugcc

SEQ ID NO: 3795 - RNA, 22 nt, Artificial Sequence
  Synthetic
agaauuauauacuaacugugcc

SEQ ID NO: 3796 - RNA, 23 nt, Artificial Sequence
  Synthetic
aagaauuauauacuaacugugcc

SEQ ID NO: 3797 - RNA, 24 nt, Artificial Sequence
  Synthetic
aaagaauuauauacuaacugugcc

SEQ ID NO: 3798 - RNA, 18 nt, Artificial Sequence
  Synthetic
cagagggcaucuuguggc

SEQ ID NO: 3799 - RNA, 19 nt, Artificial Sequence
  Synthetic
ccagagggcaucuuguggc

SEQ ID NO: 3800 - RNA, 20 nt, Artificial Sequence
  Synthetic
cccagagggcaucuuguggc

SEQ ID NO: 3801 - RNA, 21 nt, Artificial Sequence
  Synthetic
gcccagagggcaucuuguggc

SEQ ID NO: 3802 - RNA, 22 nt, Artificial Sequence
  Synthetic
agcccagagggcaucuuguggc

SEQ ID NO: 3803 - RNA, 23 nt, Artificial Sequence
  Synthetic
aagcccagagggcaucuuguggc

SEQ ID NO: 3804 - RNA, 24 nt, Artificial Sequence
  Synthetic
gaagcccagagggcaucuuguggc

SEQ ID NO: 3805 - RNA, 18 nt, Artificial Sequence
  Synthetic
uauucuagagccaagguc

SEQ ID NO: 3806 - RNA, 19 nt, Artificial Sequence
  Synthetic
uuauucuagagccaagguc

SEQ ID NO: 3807 - RNA, 20 nt, Artificial Sequence
  Synthetic
uuuauucuagagccaagguc

SEQ ID NO: 3808 - RNA, 21 nt, Artificial Sequence
  Synthetic
uuuuauucuagagccaagguc

SEQ ID NO: 3809 - RNA, 22 nt, Artificial Sequence
  Synthetic
uuuuuauucuagagccaagguc

SEQ ID NO: 3810 - RNA, 23 nt, Artificial Sequence
  Synthetic
cuuuuuauucuagagccaagguc

SEQ ID NO: 3811 - RNA, 24 nt, Artificial Sequence
  Synthetic
gcuuuuuauucuagagccaagguc

SEQ ID NO: 3812 - RNA, 18 nt, Artificial Sequence
  Synthetic
ccacuaagauccuggguc

SEQ ID NO: 3813 - RNA, 19 nt, Artificial Sequence
  Synthetic
cccacuaagauccuggguc

SEQ ID NO: 3814 - RNA, 20 nt, Artificial Sequence
  Synthetic
ccccacuaagauccuggguc

SEQ ID NO: 3815 - RNA, 21 nt, Artificial Sequence
  Synthetic
uccccacuaagauccuggguc

SEQ ID NO: 3816 - RNA, 22 nt, Artificial Sequence
  Synthetic
auccccacuaagauccuggguc

SEQ ID NO: 3817 - RNA, 23 nt, Artificial Sequence
  Synthetic
aauccccacuaagauccuggguc

SEQ ID NO: 3818 - RNA, 24 nt, Artificial Sequence
  Synthetic
aaauccccacuaagauccuggguc

SEQ ID NO: 3819 - RNA, 18 nt, Artificial Sequence
  Synthetic
uuaggcuucccucuuguc

SEQ ID NO: 3820 - RNA, 19 nt, Artificial Sequence
  Synthetic
uuuaggcuucccucuuguc

SEQ ID NO: 3821 - RNA, 20 nt, Artificial Sequence
  Synthetic
uuuuaggcuucccucuuguc

SEQ ID NO: 3822 - RNA, 21 nt, Artificial Sequence
  Synthetic
uuuuuaggcuucccucuuguc

SEQ ID NO: 3823 - RNA, 22 nt, Artificial Sequence
  Synthetic
auuuuuaggcuucccucuuguc

SEQ ID NO: 3824 - RNA, 23 nt, Artificial Sequence
  Synthetic
cauuuuuaggcuucccucuuguc

SEQ ID NO: 3825 - RNA, 24 nt, Artificial Sequence
  Synthetic
ccauuuuuaggcuucccucuuguc

SEQ ID NO: 3826 - RNA, 18 nt, Artificial Sequence
  Synthetic
agccaaagcuuuuuauuc

SEQ ID NO: 3827 - RNA, 19 nt, Artificial Sequence
  Synthetic
aagccaaagcuuuuuauuc

SEQ ID NO: 3828 - RNA, 20 nt, Artificial Sequence
  Synthetic
caagccaaagcuuuuuauuc

SEQ ID NO: 3829 - RNA, 21 nt, Artificial Sequence
  Synthetic
acaagccaaagcuuuuuauuc

SEQ ID NO: 3830 - RNA, 22 nt, Artificial Sequence
  Synthetic
cacaagccaaagcuuuuuauuc

SEQ ID NO: 3831 - RNA, 23 nt, Artificial Sequence
  Synthetic
ucacaagccaaagcuuuuuauuc

SEQ ID NO: 3832 - RNA, 24 nt, Artificial Sequence
  Synthetic
aucacaagccaaagcuuuuuauuc

SEQ ID NO: 3833 - RNA, 18 nt, Artificial Sequence
  Synthetic
uccuggguccagaaaaag

SEQ ID NO: 3834 - RNA, 19 nt, Artificial Sequence
  Synthetic
auccuggguccagaaaaag

SEQ ID NO: 3835 - RNA, 20 nt, Artificial Sequence
  Synthetic
gauccuggguccagaaaaag

SEQ ID NO: 3836 - RNA, 21 nt, Artificial Sequence
  Synthetic
agauccuggguccagaaaaag

SEQ ID NO: 3837 - RNA, 22 nt, Artificial Sequence
  Synthetic
aagauccuggguccagaaaaag

SEQ ID NO: 3838 - RNA, 23 nt, Artificial Sequence
  Synthetic
uaagauccuggguccagaaaaag

SEQ ID NO: 3839 - RNA, 24 nt, Artificial Sequence
  Synthetic
cuaagauccuggguccagaaaaag

SEQ ID NO: 3840 - RNA, 18 nt, Artificial Sequence
  Synthetic
gcaccuuagacuaggcag

SEQ ID NO: 3841 - RNA, 19 nt, Artificial Sequence
  Synthetic
ugcaccuuagacuaggcag

SEQ ID NO: 3842 - RNA, 20 nt, Artificial Sequence
  Synthetic
cugcaccuuagacuaggcag

SEQ ID NO: 3843 - RNA, 21 nt, Artificial Sequence
  Synthetic
ccugcaccuuagacuaggcag

SEQ ID NO: 3844 - RNA, 22 nt, Artificial Sequence
  Synthetic
cccugcaccuuagacuaggcag

SEQ ID NO: 3845 - RNA, 23 nt, Artificial Sequence
  Synthetic
ucccugcaccuuagacuaggcag

SEQ ID NO: 3846 - RNA, 24 nt, Artificial Sequence
  Synthetic
cucccugcaccuuagacuaggcag

SEQ ID NO: 3847 - RNA, 18 nt, Artificial Sequence
  Synthetic
uaaguucagcugcucuag

SEQ ID NO: 3848 - RNA, 19 nt, Artificial Sequence
  Synthetic
uuaaguucagcugcucuag

SEQ ID NO: 3849 - RNA, 20 nt, Artificial Sequence
  Synthetic
uuuaaguucagcugcucuag

SEQ ID NO: 3850 - RNA, 21 nt, Artificial Sequence
  Synthetic
auuuaaguucagcugcucuag

SEQ ID NO: 3851 - RNA, 22 nt, Artificial Sequence
  Synthetic
uauuuaaguucagcugcucuag

SEQ ID NO: 3852 - RNA, 23 nt, Artificial Sequence
  Synthetic
cuauuuaaguucagcugcucuag

SEQ ID NO: 3853 - RNA, 24 nt, Artificial Sequence
  Synthetic
ucuauuuaaguucagcugcucuag

SEQ ID NO: 3854 - RNA, 18 nt, Artificial Sequence
  Synthetic
augaaacugauauauuag

SEQ ID NO: 3855 - RNA, 19 nt, Artificial Sequence
  Synthetic
caugaaacugauauauuag

SEQ ID NO: 3856 - RNA, 20 nt, Artificial Sequence
  Synthetic
ccaugaaacugauauauuag

SEQ ID NO: 3857 - RNA, 21 nt, Artificial Sequence
  Synthetic
gccaugaaacugauauauuag

SEQ ID NO: 3858 - RNA, 22 nt, Artificial Sequence
  Synthetic
ugccaugaaacugauauauuag

SEQ ID NO: 3859 - RNA, 23 nt, Artificial Sequence
  Synthetic
gugccaugaaacugauauauuag

SEQ ID NO: 3860 - RNA, 24 nt, Artificial Sequence
  Synthetic
ugugccaugaaacugauauauuag

SEQ ID NO: 3861 - RNA, 18 nt, Artificial Sequence
  Synthetic
ggcuucccucuugucugg

SEQ ID NO: 3862 - RNA, 19 nt, Artificial Sequence
  Synthetic
aggcuucccucuugucugg

SEQ ID NO: 3863 - RNA, 20 nt, Artificial Sequence
  Synthetic
uaggcuucccucuugucugg

SEQ ID NO: 3864 - RNA, 21 nt, Artificial Sequence
  Synthetic
uuaggcuucccucuugucugg

SEQ ID NO: 3865 - RNA, 22 nt, Artificial Sequence
  Synthetic
uuuaggcuucccucuugucugg

SEQ ID NO: 3866 - RNA, 23 nt, Artificial Sequence
  Synthetic
uuuuaggcuucccucuugucugg

SEQ ID NO: 3867 - RNA, 24 nt, Artificial Sequence
  Synthetic
uuuuuaggcuucccucuugucugg

SEQ ID NO: 3868 - RNA, 18 nt, Artificial Sequence
  Synthetic
ccauauacuuaugucaug

SEQ ID NO: 3869 - RNA, 19 nt, Artificial Sequence
  Synthetic
accauauacuuaugucaug

SEQ ID NO: 3870 - RNA, 20 nt, Artificial Sequence
  Synthetic
gaccauauacuuaugucaug

SEQ ID NO: 3871 - RNA, 21 nt, Artificial Sequence
  Synthetic
ugaccauauacuuaugucaug

SEQ ID NO: 3872 - RNA, 22 nt, Artificial Sequence
  Synthetic
uugaccauauacuuaugucaug

SEQ ID NO: 3873 - RNA, 23 nt, Artificial Sequence
  Synthetic
cuugaccauauacuuaugucaug

SEQ ID NO: 3874 - RNA, 24 nt, Artificial Sequence
  Synthetic
acuugaccauauacuuaugucaug

SEQ ID NO: 3875 - RNA, 18 nt, Artificial Sequence
  Synthetic
aggcuucccucuugucug

SEQ ID NO: 3876 - RNA, 19 nt, Artificial Sequence
  Synthetic
uaggcuucccucuugucug

SEQ ID NO: 3877 - RNA, 20 nt, Artificial Sequence
  Synthetic
uuaggcuucccucuugucug

SEQ ID NO: 3878 - RNA, 21 nt, Artificial Sequence
  Synthetic
uuuaggcuucccucuugucug

SEQ ID NO: 3879 - RNA, 22 nt, Artificial Sequence
  Synthetic
uuuuaggcuucccucuugucug

SEQ ID NO: 3880 - RNA, 23 nt, Artificial Sequence
  Synthetic
uuuuuaggcuucccucuugucug

SEQ ID NO: 3881 - RNA, 24 nt, Artificial Sequence
  Synthetic
auuuuuaggcuucccucuugucug

SEQ ID NO: 3882 - RNA, 18 nt, Artificial Sequence
  Synthetic
uaaaugcuuacugguuug

SEQ ID NO: 3883 - RNA, 19 nt, Artificial Sequence
  Synthetic
auaaaugcuuacugguuug

SEQ ID NO: 3884 - RNA, 20 nt, Artificial Sequence
  Synthetic
cauaaaugcuuacugguuug

SEQ ID NO: 3885 - RNA, 21 nt, Artificial Sequence
  Synthetic
ucauaaaugcuuacugguuug

SEQ ID NO: 3886 - RNA, 22 nt, Artificial Sequence
  Synthetic
cucauaaaugcuuacugguuug

SEQ ID NO: 3887 - RNA, 23 nt, Artificial Sequence
  Synthetic
ccucauaaaugcuuacugguuug

SEQ ID NO: 3888 - RNA, 24 nt, Artificial Sequence
  Synthetic
uccucauaaaugcuuacugguuug

SEQ ID NO: 3889 - RNA, 18 nt, Artificial Sequence
  Synthetic
accauauacuuaugucau

SEQ ID NO: 3890 - RNA, 19 nt, Artificial Sequence
  Synthetic
gaccauauacuuaugucau

SEQ ID NO: 3891 - RNA, 20 nt, Artificial Sequence
  Synthetic
ugaccauauacuuaugucau

SEQ ID NO: 3892 - RNA, 21 nt, Artificial Sequence
  Synthetic
uugaccauauacuuaugucau

SEQ ID NO: 3893 - RNA, 22 nt, Artificial Sequence
  Synthetic
cuugaccauauacuuaugucau

SEQ ID NO: 3894 - RNA, 23 nt, Artificial Sequence
  Synthetic
acuugaccauauacuuaugucau

SEQ ID NO: 3895 - RNA, 24 nt, Artificial Sequence
  Synthetic
aacuugaccauauacuuaugucau

SEQ ID NO: 3896 - RNA, 18 nt, Artificial Sequence
  Synthetic
cuggguccagaaaaagau

SEQ ID NO: 3897 - RNA, 19 nt, Artificial Sequence
  Synthetic
ccuggguccagaaaaagau

SEQ ID NO: 3898 - RNA, 20 nt, Artificial Sequence
  Synthetic
uccuggguccagaaaaagau

SEQ ID NO: 3899 - RNA, 21 nt, Artificial Sequence
  Synthetic
auccuggguccagaaaaagau

SEQ ID NO: 3900 - RNA, 22 nt, Artificial Sequence
  Synthetic
gauccuggguccagaaaaagau

SEQ ID NO: 3901 - RNA, 23 nt, Artificial Sequence
  Synthetic
agauccuggguccagaaaaagau

SEQ ID NO: 3902 - RNA, 24 nt, Artificial Sequence
  Synthetic
aagauccuggguccagaaaaagau

SEQ ID NO: 3903 - RNA, 18 nt, Artificial Sequence
  Synthetic
gccaugaaacugauauau

SEQ ID NO: 3904 - RNA, 19 nt, Artificial Sequence
  Synthetic
ugccaugaaacugauauau

SEQ ID NO: 3905 - RNA, 20 nt, Artificial Sequence
  Synthetic
gugccaugaaacugauauau

SEQ ID NO: 3906 - RNA, 21 nt, Artificial Sequence
  Synthetic
ugugccaugaaacugauauau

SEQ ID NO: 3907 - RNA, 22 nt, Artificial Sequence
  Synthetic
cugugccaugaaacugauauau

SEQ ID NO: 3908 - RNA, 23 nt, Artificial Sequence
  Synthetic
acugugccaugaaacugauauau

SEQ ID NO: 3909 - RNA, 24 nt, Artificial Sequence
  Synthetic
aacugugccaugaaacugauauau

SEQ ID NO: 3910 - RNA, 18 nt, Artificial Sequence
  Synthetic
gcuucagauagauuauau

SEQ ID NO: 3911 - RNA, 19 nt, Artificial Sequence
  Synthetic
agcuucagauagauuauau

SEQ ID NO: 3912 - RNA, 20 nt, Artificial Sequence
  Synthetic
uagcuucagauagauuauau

SEQ ID NO: 3913 - RNA, 21 nt, Artificial Sequence
  Synthetic
auagcuucagauagauuauau

SEQ ID NO: 3914 - RNA, 22 nt, Artificial Sequence
  Synthetic
cauagcuucagauagauuauau

SEQ ID NO: 3915 - RNA, 23 nt, Artificial Sequence
  Synthetic
ucauagcuucagauagauuauau

SEQ ID NO: 3916 - RNA, 24 nt, Artificial Sequence
  Synthetic
cucauagcuucagauagauuauau

SEQ ID NO: 3917 - RNA, 18 nt, Artificial Sequence
  Synthetic
accuuagacuaggcagcu

SEQ ID NO: 3918 - RNA, 19 nt, Artificial Sequence
  Synthetic
caccuuagacuaggcagcu

SEQ ID NO: 3919 - RNA, 20 nt, Artificial Sequence
  Synthetic
gcaccuuagacuaggcagcu

SEQ ID NO: 3920 - RNA, 21 nt, Artificial Sequence
  Synthetic
ugcaccuuagacuaggcagcu

SEQ ID NO: 3921 - RNA, 22 nt, Artificial Sequence
  Synthetic
cugcaccuuagacuaggcagcu

SEQ ID NO: 3922 - RNA, 23 nt, Artificial Sequence
  Synthetic
ccugcaccuuagacuaggcagcu

SEQ ID NO: 3923 - RNA, 24 nt, Artificial Sequence
  Synthetic
cccugcaccuuagacuaggcagcu

SEQ ID NO: 3924 - RNA, 18 nt, Artificial Sequence
  Synthetic
agagggcaucuuguggcu

SEQ ID NO: 3925 - RNA, 19 nt, Artificial Sequence
  Synthetic
cagagggcaucuuguggcu

SEQ ID NO: 3926 - RNA, 20 nt, Artificial Sequence
  Synthetic
ccagagggcaucuuguggcu

SEQ ID NO: 3927 - RNA, 21 nt, Artificial Sequence
  Synthetic
cccagagggcaucuuguggcu

SEQ ID NO: 3928 - RNA, 22 nt, Artificial Sequence
  Synthetic
gcccagagggcaucuuguggcu

SEQ ID NO: 3929 - RNA, 23 nt, Artificial Sequence
  Synthetic
agcccagagggcaucuuguggcu

SEQ ID NO: 3930 - RNA, 24 nt, Artificial Sequence
  Synthetic
aagcccagagggcaucuuguggcu

SEQ ID NO: 3931 - RNA, 18 nt, Artificial Sequence
  Synthetic
gggucucauuugccuucu

SEQ ID NO: 3932 - RNA, 19 nt, Artificial Sequence
  Synthetic
ggggucucauuugccuucu

SEQ ID NO: 3933 - RNA, 20 nt, Artificial Sequence
  Synthetic
uggggucucauuugccuucu

SEQ ID NO: 3934 - RNA, 21 nt, Artificial Sequence
  Synthetic
uuggggucucauuugccuucu

SEQ ID NO: 3935 - RNA, 22 nt, Artificial Sequence
  Synthetic
uuuggggucucauuugccuucu

SEQ ID NO: 3936 - RNA, 23 nt, Artificial Sequence
  Synthetic
guuuggggucucauuugccuucu

SEQ ID NO: 3937 - RNA, 24 nt, Artificial Sequence
  Synthetic
uguuuggggucucauuugccuucu

SEQ ID NO: 3938 - RNA, 18 nt, Artificial Sequence
  Synthetic
aaaauccucacauuuucu

SEQ ID NO: 3939 - RNA, 19 nt, Artificial Sequence
  Synthetic
uaaaauccucacauuuucu

SEQ ID NO: 3940 - RNA, 20 nt, Artificial Sequence
  Synthetic
guaaaauccucacauuuucu

SEQ ID NO: 3941 - RNA, 21 nt, Artificial Sequence
  Synthetic
uguaaaauccucacauuuucu

SEQ ID NO: 3942 - RNA, 22 nt, Artificial Sequence
  Synthetic
uuguaaaauccucacauuuucu

SEQ ID NO: 3943 - RNA, 23 nt, Artificial Sequence
  Synthetic
auuguaaaauccucacauuuucu

SEQ ID NO: 3944 - RNA, 24 nt, Artificial Sequence
  Synthetic
aauuguaaaauccucacauuuucu

SEQ ID NO: 3945 - RNA, 18 nt, Artificial Sequence
  Synthetic
ucauaaaugcuuacuggu

SEQ ID NO: 3946 - RNA, 19 nt, Artificial Sequence
  Synthetic
cucauaaaugcuuacuggu

SEQ ID NO: 3947 - RNA, 20 nt, Artificial Sequence
  Synthetic
ccucauaaaugcuuacuggu

SEQ ID NO: 3948 - RNA, 21 nt, Artificial Sequence
  Synthetic
uccucauaaaugcuuacuggu

SEQ ID NO: 3949 - RNA, 22 nt, Artificial Sequence
  Synthetic
guccucauaaaugcuuacuggu

SEQ ID NO: 3950 - RNA, 23 nt, Artificial Sequence
  Synthetic
aguccucauaaaugcuuacuggu

SEQ ID NO: 3951 - RNA, 24 nt, Artificial Sequence
  Synthetic
gaguccucauaaaugcuuacuggu

SEQ ID NO: 3952 - RNA, 18 nt, Artificial Sequence
  Synthetic
ggcacguaauuuugcugu

SEQ ID NO: 3953 - RNA, 19 nt, Artificial Sequence
  Synthetic
gggcacguaauuuugcugu

SEQ ID NO: 3954 - RNA, 20 nt, Artificial Sequence
  Synthetic
ggggcacguaauuuugcugu

SEQ ID NO: 3955 - RNA, 21 nt, Artificial Sequence
  Synthetic
gggggcacguaauuuugcugu

SEQ ID NO: 3956 - RNA, 22 nt, Artificial Sequence
  Synthetic
ugggggcacguaauuuugcugu

SEQ ID NO: 3957 - RNA, 23 nt, Artificial Sequence
  Synthetic
uugggggcacguaauuuugcugu

SEQ ID NO: 3958 - RNA, 24 nt, Artificial Sequence
  Synthetic
auugggggcacguaauuuugcugu

SEQ ID NO: 3959 - RNA, 18 nt, Artificial Sequence
  Synthetic
uuuaggcuucccucuugu

SEQ ID NO: 3960 - RNA, 19 nt, Artificial Sequence
  Synthetic
uuuuaggcuucccucuugu

SEQ ID NO: 3961 - RNA, 20 nt, Artificial Sequence
  Synthetic
uuuuuaggcuucccucuugu

SEQ ID NO: 3962 - RNA, 21 nt, Artificial Sequence
  Synthetic
auuuuuaggcuucccucuugu

SEQ ID NO: 3963 - RNA, 22 nt, Artificial Sequence
  Synthetic
cauuuuuaggcuucccucuugu

SEQ ID NO: 3964 - RNA, 23 nt, Artificial Sequence
  Synthetic
ccauuuuuaggcuucccucuugu

SEQ ID NO: 3965 - RNA, 24 nt, Artificial Sequence
  Synthetic
accauuuuuaggcuucccucuugu

SEQ ID NO: 3966 - RNA, 18 nt, Artificial Sequence
  Synthetic
aaaagcucauuuuuaauu

SEQ ID NO: 3967 - RNA, 19 nt, Artificial Sequence
  Synthetic
gaaaagcucauuuuuaauu

SEQ ID NO: 3968 - RNA, 20 nt, Artificial Sequence
  Synthetic
agaaaagcucauuuuuaauu

SEQ ID NO: 3969 - RNA, 21 nt, Artificial Sequence
  Synthetic
uagaaaagcucauuuuuaauu

SEQ ID NO: 3970 - RNA, 22 nt, Artificial Sequence
  Synthetic
cuagaaaagcucauuuuuaauu

SEQ ID NO: 3971 - RNA, 23 nt, Artificial Sequence
  Synthetic
ccuagaaaagcucauuuuuaauu

SEQ ID NO: 3972 - RNA, 24 nt, Artificial Sequence
  Synthetic
cccuagaaaagcucauuuuuaauu

SEQ ID NO: 3973 - RNA, 18 nt, Artificial Sequence
  Synthetic
acuuagacacaacuucuu

SEQ ID NO: 3974 - RNA, 19 nt, Artificial Sequence
  Synthetic
gacuuagacacaacuucuu

SEQ ID NO: 3975 - RNA, 20 nt, Artificial Sequence
  Synthetic
agacuuagacacaacuucuu

SEQ ID NO: 3976 - RNA, 21 nt, Artificial Sequence
  Synthetic
cagacuuagacacaacuucuu

SEQ ID NO: 3977 - RNA, 22 nt, Artificial Sequence
  Synthetic
ccagacuuagacacaacuucuu

SEQ ID NO: 3978 - RNA, 23 nt, Artificial Sequence
  Synthetic
accagacuuagacacaacuucuu

SEQ ID NO: 3979 - RNA, 24 nt, Artificial Sequence
  Synthetic
aaccagacuuagacacaacuucuu

SEQ ID NO: 3980 - RNA, 18 nt, Artificial Sequence
  Synthetic
uaugguucaaaauuaaaa

SEQ ID NO: 3981 - RNA, 19 nt, Artificial Sequence
  Synthetic
uuaugguucaaaauuaaaa

SEQ ID NO: 3982 - RNA, 20 nt, Artificial Sequence
  Synthetic
uuuaugguucaaaauuaaaa

SEQ ID NO: 3983 - RNA, 21 nt, Artificial Sequence
  Synthetic
cuuuaugguucaaaauuaaaa

SEQ ID NO: 3984 - RNA, 22 nt, Artificial Sequence
  Synthetic
ucuuuaugguucaaaauuaaaa

SEQ ID NO: 3985 - RNA, 23 nt, Artificial Sequence
  Synthetic
uucuuuaugguucaaaauuaaaa

SEQ ID NO: 3986 - RNA, 24 nt, Artificial Sequence
  Synthetic
auucuuuaugguucaaaauuaaaa

SEQ ID NO: 3987 - RNA, 18 nt, Artificial Sequence
  Synthetic
ucuuuuuccuccagacaa

SEQ ID NO: 3988 - RNA, 19 nt, Artificial Sequence
  Synthetic
uucuuuuuccuccagacaa

SEQ ID NO: 3989 - RNA, 20 nt, Artificial Sequence
  Synthetic
uuucuuuuuccuccagacaa

SEQ ID NO: 3990 - RNA, 21 nt, Artificial Sequence
  Synthetic
uuuucuuuuuccuccagacaa

SEQ ID NO: 3991 - RNA, 22 nt, Artificial Sequence
  Synthetic
uuuuucuuuuuccuccagacaa

SEQ ID NO: 3992 - RNA, 23 nt, Artificial Sequence
  Synthetic
uuuuuucuuuuuccuccagacaa

SEQ ID NO: 3993 - RNA, 24 nt, Artificial Sequence
  Synthetic
cuuuuuucuuuuuccuccagacaa

SEQ ID NO: 3994 - RNA, 18 nt, Artificial Sequence
  Synthetic
ugaucucuaagaaggcaa

SEQ ID NO: 3995 - RNA, 19 nt, Artificial Sequence
  Synthetic
gugaucucuaagaaggcaa

SEQ ID NO: 3996 - RNA, 20 nt, Artificial Sequence
  Synthetic
ugugaucucuaagaaggcaa

SEQ ID NO: 3997 - RNA, 21 nt, Artificial Sequence
  Synthetic
uugugaucucuaagaaggcaa

SEQ ID NO: 3998 - RNA, 22 nt, Artificial Sequence
  Synthetic
cuugugaucucuaagaaggcaa

SEQ ID NO: 3999 - RNA, 23 nt, Artificial Sequence
  Synthetic
gcuugugaucucuaagaaggcaa

SEQ ID NO: 4000 - RNA, 24 nt, Artificial Sequence
  Synthetic
ggcuugugaucucuaagaaggcaa

SEQ ID NO: 4001 - RNA, 18 nt, Artificial Sequence
  Synthetic
acucacaggguuuaauaa

SEQ ID NO: 4002 - RNA, 19 nt, Artificial Sequence
  Synthetic
gacucacaggguuuaauaa

SEQ ID NO: 4003 - RNA, 20 nt, Artificial Sequence
  Synthetic
agacucacaggguuuaauaa

SEQ ID NO: 4004 - RNA, 21 nt, Artificial Sequence
  Synthetic
gagacucacaggguuuaauaa

SEQ ID NO: 4005 - RNA, 22 nt, Artificial Sequence
  Synthetic
ugagacucacaggguuuaauaa

SEQ ID NO: 4006 - RNA, 23 nt, Artificial Sequence
  Synthetic
uugagacucacaggguuuaauaa

SEQ ID NO: 4007 - RNA, 24 nt, Artificial Sequence
  Synthetic
uuugagacucacaggguuuaauaa

SEQ ID NO: 4008 - RNA, 18 nt, Artificial Sequence
  Synthetic
agagcugagaagacagca

SEQ ID NO: 4009 - RNA, 19 nt, Artificial Sequence
  Synthetic
cagagcugagaagacagca

SEQ ID NO: 4010 - RNA, 20 nt, Artificial Sequence
  Synthetic
gcagagcugagaagacagca

SEQ ID NO: 4011 - RNA, 21 nt, Artificial Sequence
  Synthetic
agcagagcugagaagacagca

SEQ ID NO: 4012 - RNA, 22 nt, Artificial Sequence
  Synthetic
cagcagagcugagaagacagca

SEQ ID NO: 4013 - RNA, 23 nt, Artificial Sequence
  Synthetic
ucagcagagcugagaagacagca

SEQ ID NO: 4014 - RNA, 24 nt, Artificial Sequence
  Synthetic
gucagcagagcugagaagacagca

SEQ ID NO: 4015 - RNA, 18 nt, Artificial Sequence
  Synthetic
cuacaaacacaaacuuca

SEQ ID NO: 4016 - RNA, 19 nt, Artificial Sequence
  Synthetic
acuacaaacacaaacuuca

SEQ ID NO: 4017 - RNA, 20 nt, Artificial Sequence
  Synthetic
aacuacaaacacaaacuuca

SEQ ID NO: 4018 - RNA, 21 nt, Artificial Sequence
  Synthetic
aaacuacaaacacaaacuuca

SEQ ID NO: 4019 - RNA, 22 nt, Artificial Sequence
  Synthetic
gaaacuacaaacacaaacuuca

SEQ ID NO: 4020 - RNA, 23 nt, Artificial Sequence
  Synthetic
agaaacuacaaacacaaacuuca

SEQ ID NO: 4021 - RNA, 24 nt, Artificial Sequence
  Synthetic
cagaaacuacaaacacaaacuuca

SEQ ID NO: 4022 - RNA, 18 nt, Artificial Sequence
  Synthetic
uuuuuccuccagacaaga

SEQ ID NO: 4023 - RNA, 19 nt, Artificial Sequence
  Synthetic
cuuuuuccuccagacaaga

SEQ ID NO: 4024 - RNA, 20 nt, Artificial Sequence
  Synthetic
ucuuuuuccuccagacaaga

SEQ ID NO: 4025 - RNA, 21 nt, Artificial Sequence
  Synthetic
uucuuuuuccuccagacaaga

SEQ ID NO: 4026 - RNA, 22 nt, Artificial Sequence
  Synthetic
uuucuuuuuccuccagacaaga

SEQ ID NO: 4027 - RNA, 23 nt, Artificial Sequence
  Synthetic
uuuucuuuuuccuccagacaaga

SEQ ID NO: 4028 - RNA, 24 nt, Artificial Sequence
  Synthetic
uuuuucuuuuuccuccagacaaga

SEQ ID NO: 4029 - RNA, 18 nt, Artificial Sequence
  Synthetic
uacgugcccccaauccua

SEQ ID NO: 4030 - RNA, 19 nt, Artificial Sequence
  Synthetic
uuacgugcccccaauccua

SEQ ID NO: 4031 - RNA, 20 nt, Artificial Sequence
  Synthetic
auuacgugcccccaauccua

SEQ ID NO: 4032 - RNA, 21 nt, Artificial Sequence
  Synthetic
aauuacgugcccccaauccua

SEQ ID NO: 4033 - RNA, 22 nt, Artificial Sequence
  Synthetic
aaauuacgugcccccaauccua

SEQ ID NO: 4034 - RNA, 23 nt, Artificial Sequence
  Synthetic
aaaauuacgugcccccaauccua

SEQ ID NO: 4035 - RNA, 24 nt, Artificial Sequence
  Synthetic
caaaauuacgugcccccaauccua

SEQ ID NO: 4036 - RNA, 18 nt, Artificial Sequence
  Synthetic
ucuggacccaggaucuua

SEQ ID NO: 4037 - RNA, 19 nt, Artificial Sequence
  Synthetic
uucuggacccaggaucuua

SEQ ID NO: 4038 - RNA, 20 nt, Artificial Sequence
  Synthetic
uuucuggacccaggaucuua

SEQ ID NO: 4039 - RNA, 21 nt, Artificial Sequence
  Synthetic
uuuucuggacccaggaucuua

SEQ ID NO: 4040 - RNA, 22 nt, Artificial Sequence
  Synthetic
uuuuucuggacccaggaucuua

SEQ ID NO: 4041 - RNA, 23 nt, Artificial Sequence
  Synthetic
cuuuuucuggacccaggaucuua

SEQ ID NO: 4042 - RNA, 24 nt, Artificial Sequence
  Synthetic
ucuuuuucuggacccaggaucuua

SEQ ID NO: 4043 - RNA, 18 nt, Artificial Sequence
  Synthetic
uuucuuuuuccuccagac

SEQ ID NO: 4044 - RNA, 19 nt, Artificial Sequence
  Synthetic
uuuucuuuuuccuccagac

SEQ ID NO: 4045 - RNA, 20 nt, Artificial Sequence
  Synthetic
uuuuucuuuuuccuccagac

SEQ ID NO: 4046 - RNA, 21 nt, Artificial Sequence
  Synthetic
uuuuuucuuuuuccuccagac

SEQ ID NO: 4047 - RNA, 22 nt, Artificial Sequence
  Synthetic
cuuuuuucuuuuuccuccagac

SEQ ID NO: 4048 - RNA, 23 nt, Artificial Sequence
  Synthetic
ucuuuuuucuuuuuccuccagac

SEQ ID NO: 4049 - RNA, 24 nt, Artificial Sequence
  Synthetic
cucuuuuuucuuuuuccuccagac

SEQ ID NO: 4050 - RNA, 18 nt, Artificial Sequence
  Synthetic
gucaucuaugaccuuccc

SEQ ID NO: 4051 - RNA, 19 nt, Artificial Sequence
  Synthetic
ugucaucuaugaccuuccc

SEQ ID NO: 4052 - RNA, 20 nt, Artificial Sequence
  Synthetic
uugucaucuaugaccuuccc

SEQ ID NO: 4053 - RNA, 21 nt, Artificial Sequence
  Synthetic
guugucaucuaugaccuuccc

SEQ ID NO: 4054 - RNA, 22 nt, Artificial Sequence
  Synthetic
uguugucaucuaugaccuuccc

SEQ ID NO: 4055 - RNA, 23 nt, Artificial Sequence
  Synthetic
cuguugucaucuaugaccuuccc

SEQ ID NO: 4056 - RNA, 24 nt, Artificial Sequence
  Synthetic
gcuguugucaucuaugaccuuccc

SEQ ID NO: 4057 - RNA, 18 nt, Artificial Sequence
  Synthetic
ugucaucuaugaccuucc

SEQ ID NO: 4058 - RNA, 19 nt, Artificial Sequence
  Synthetic
uugucaucuaugaccuucc

SEQ ID NO: 4059 - RNA, 20 nt, Artificial Sequence
  Synthetic
guugucaucuaugaccuucc

SEQ ID NO: 4060 - RNA, 21 nt, Artificial Sequence
  Synthetic
uguugucaucuaugaccuucc

SEQ ID NO: 4061 - RNA, 22 nt, Artificial Sequence
  Synthetic
cuguugucaucuaugaccuucc

SEQ ID NO: 4062 - RNA, 23 nt, Artificial Sequence
  Synthetic
gcuguugucaucuaugaccuucc

SEQ ID NO: 4063 - RNA, 24 nt, Artificial Sequence
  Synthetic
ggcuguugucaucuaugaccuucc

SEQ ID NO: 4064 - RNA, 18 nt, Artificial Sequence
  Synthetic
uaagagaaaauucucagc

SEQ ID NO: 4065 - RNA, 19 nt, Artificial Sequence
  Synthetic
auaagagaaaauucucagc

SEQ ID NO: 4066 - RNA, 20 nt, Artificial Sequence
  Synthetic
aauaagagaaaauucucagc

SEQ ID NO: 4067 - RNA, 21 nt, Artificial Sequence
  Synthetic
uaauaagagaaaauucucagc

SEQ ID NO: 4068 - RNA, 22 nt, Artificial Sequence
  Synthetic
uuaauaagagaaaauucucagc

SEQ ID NO: 4069 - RNA, 23 nt, Artificial Sequence
  Synthetic
uuuaauaagagaaaauucucagc

SEQ ID NO: 4070 - RNA, 24 nt, Artificial Sequence
  Synthetic
guuuaauaagagaaaauucucagc

SEQ ID NO: 4071 - RNA, 18 nt, Artificial Sequence
  Synthetic
cugccuagucuaaggugc

SEQ ID NO: 4072 - RNA, 19 nt, Artificial Sequence
  Synthetic
gcugccuagucuaaggugc

SEQ ID NO: 4073 - RNA, 20 nt, Artificial Sequence
  Synthetic
agcugccuagucuaaggugc

SEQ ID NO: 4074 - RNA, 21 nt, Artificial Sequence
  Synthetic
cagcugccuagucuaaggugc

SEQ ID NO: 4075 - RNA, 22 nt, Artificial Sequence
  Synthetic
ucagcugccuagucuaaggugc

SEQ ID NO: 4076 - RNA, 23 nt, Artificial Sequence
  Synthetic
cucagcugccuagucuaaggugc

SEQ ID NO: 4077 - RNA, 24 nt, Artificial Sequence
  Synthetic
ucucagcugccuagucuaaggugc

SEQ ID NO: 4078 - RNA, 18 nt, Artificial Sequence
  Synthetic
gacagcagagagcuacuc

SEQ ID NO: 4079 - RNA, 19 nt, Artificial Sequence
  Synthetic
agacagcagagagcuacuc

SEQ ID NO: 4080 - RNA, 20 nt, Artificial Sequence
  Synthetic
aagacagcagagagcuacuc

SEQ ID NO: 4081 - RNA, 21 nt, Artificial Sequence
  Synthetic
gaagacagcagagagcuacuc

SEQ ID NO: 4082 - RNA, 22 nt, Artificial Sequence
  Synthetic
agaagacagcagagagcuacuc

SEQ ID NO: 4083 - RNA, 23 nt, Artificial Sequence
  Synthetic
gagaagacagcagagagcuacuc

SEQ ID NO: 4084 - RNA, 24 nt, Artificial Sequence
  Synthetic
ugagaagacagcagagagcuacuc

SEQ ID NO: 4085 - RNA, 18 nt, Artificial Sequence
  Synthetic
auuaaaaaugagcuuuuc

SEQ ID NO: 4086 - RNA, 19 nt, Artificial Sequence
  Synthetic
aauuaaaaaugagcuuuuc

SEQ ID NO: 4087 - RNA, 20 nt, Artificial Sequence
  Synthetic
aaauuaaaaaugagcuuuuc

SEQ ID NO: 4088 - RNA, 21 nt, Artificial Sequence
  Synthetic
aaaauuaaaaaugagcuuuuc

SEQ ID NO: 4089 - RNA, 22 nt, Artificial Sequence
  Synthetic
caaaauuaaaaaugagcuuuuc

SEQ ID NO: 4090 - RNA, 23 nt, Artificial Sequence
  Synthetic
ucaaaauuaaaaaugagcuuuuc

SEQ ID NO: 4091 - RNA, 24 nt, Artificial Sequence
  Synthetic
uucaaaauuaaaaaugagcuuuuc

SEQ ID NO: 4092 - RNA, 18 nt, Artificial Sequence
  Synthetic
cuuuuuccuccagacaag

SEQ ID NO: 4093 - RNA, 19 nt, Artificial Sequence
  Synthetic
ucuuuuuccuccagacaag

SEQ ID NO: 4094 - RNA, 20 nt, Artificial Sequence
  Synthetic
uucuuuuuccuccagacaag

SEQ ID NO: 4095 - RNA, 21 nt, Artificial Sequence
  Synthetic
uuucuuuuuccuccagacaag

SEQ ID NO: 4096 - RNA, 22 nt, Artificial Sequence
  Synthetic
uuuucuuuuuccuccagacaag

SEQ ID NO: 4097 - RNA, 23 nt, Artificial Sequence
  Synthetic
uuuuucuuuuuccuccagacaag

SEQ ID NO: 4098 - RNA, 24 nt, Artificial Sequence
  Synthetic
uuuuuucuuuuuccuccagacaag

SEQ ID NO: 4099 - RNA, 18 nt, Artificial Sequence
  Synthetic
gcagagcugagaagacag

SEQ ID NO: 4100 - RNA, 19 nt, Artificial Sequence
  Synthetic
agcagagcugagaagacag

SEQ ID NO: 4101 - RNA, 20 nt, Artificial Sequence
  Synthetic
cagcagagcugagaagacag

SEQ ID NO: 4102 - RNA, 21 nt, Artificial Sequence
  Synthetic
ucagcagagcugagaagacag

SEQ ID NO: 4103 - RNA, 22 nt, Artificial Sequence
  Synthetic
gucagcagagcugagaagacag

SEQ ID NO: 4104 - RNA, 23 nt, Artificial Sequence
  Synthetic
ugucagcagagcugagaagacag

SEQ ID NO: 4105 - RNA, 24 nt, Artificial Sequence
  Synthetic
uugucagcagagcugagaagacag

SEQ ID NO: 4106 - RNA, 18 nt, Artificial Sequence
  Synthetic
aauucucagcuagagcag

SEQ ID NO: 4107 - RNA, 19 nt, Artificial Sequence
  Synthetic
aaauucucagcuagagcag

SEQ ID NO: 4108 - RNA, 20 nt, Artificial Sequence
  Synthetic
aaaauucucagcuagagcag

SEQ ID NO: 4109 - RNA, 21 nt, Artificial Sequence
  Synthetic
gaaaauucucagcuagagcag

SEQ ID NO: 4110 - RNA, 22 nt, Artificial Sequence
  Synthetic
agaaaauucucagcuagagcag

SEQ ID NO: 4111 - RNA, 23 nt, Artificial Sequence
  Synthetic
gagaaaauucucagcuagagcag

SEQ ID NO: 4112 - RNA, 24 nt, Artificial Sequence
  Synthetic
agagaaaauucucagcuagagcag

SEQ ID NO: 4113 - RNA, 18 nt, Artificial Sequence
  Synthetic
auucaucugugguggcag

SEQ ID NO: 4114 - RNA, 19 nt, Artificial Sequence
  Synthetic
cauucaucugugguggcag

SEQ ID NO: 4115 - RNA, 20 nt, Artificial Sequence
  Synthetic
acauucaucugugguggcag

SEQ ID NO: 4116 - RNA, 21 nt, Artificial Sequence
  Synthetic
gacauucaucugugguggcag

SEQ ID NO: 4117 - RNA, 22 nt, Artificial Sequence
  Synthetic
ugacauucaucugugguggcag

SEQ ID NO: 4118 - RNA, 23 nt, Artificial Sequence
  Synthetic
augacauucaucugugguggcag

SEQ ID NO: 4119 - RNA, 24 nt, Artificial Sequence
  Synthetic
caugacauucaucugugguggcag

SEQ ID NO: 4120 - RNA, 18 nt, Artificial Sequence
  Synthetic
aaucucaaguauugucag

SEQ ID NO: 4121 - RNA, 19 nt, Artificial Sequence
  Synthetic
aaaucucaaguauugucag

SEQ ID NO: 4122 - RNA, 20 nt, Artificial Sequence
  Synthetic
aaaaucucaaguauugucag

SEQ ID NO: 4123 - RNA, 21 nt, Artificial Sequence
  Synthetic
gaaaaucucaaguauugucag

SEQ ID NO: 4124 - RNA, 22 nt, Artificial Sequence
  Synthetic
ugaaaaucucaaguauugucag

SEQ ID NO: 4125 - RNA, 23 nt, Artificial Sequence
  Synthetic
cugaaaaucucaaguauugucag

SEQ ID NO: 4126 - RNA, 24 nt, Artificial Sequence
  Synthetic
ucugaaaaucucaaguauugucag

SEQ ID NO: 4127 - RNA, 18 nt, Artificial Sequence
  Synthetic
caaguauugucagcagag

SEQ ID NO: 4128 - RNA, 19 nt, Artificial Sequence
  Synthetic
ucaaguauugucagcagag

SEQ ID NO: 4129 - RNA, 20 nt, Artificial Sequence
  Synthetic
cucaaguauugucagcagag

SEQ ID NO: 4130 - RNA, 21 nt, Artificial Sequence
  Synthetic
ucucaaguauugucagcagag

SEQ ID NO: 4131 - RNA, 22 nt, Artificial Sequence
  Synthetic
aucucaaguauugucagcagag

SEQ ID NO: 4132 - RNA, 23 nt, Artificial Sequence
  Synthetic
aaucucaaguauugucagcagag

SEQ ID NO: 4133 - RNA, 24 nt, Artificial Sequence
  Synthetic
aaaucucaaguauugucagcagag

SEQ ID NO: 4134 - RNA, 18 nt, Artificial Sequence
  Synthetic
cuggacccaggaucuuag

SEQ ID NO: 4135 - RNA, 19 nt, Artificial Sequence
  Synthetic
ucuggacccaggaucuuag

SEQ ID NO: 4136 - RNA, 20 nt, Artificial Sequence
  Synthetic
uucuggacccaggaucuuag

SEQ ID NO: 4137 - RNA, 21 nt, Artificial Sequence
  Synthetic
uuucuggacccaggaucuuag

SEQ ID NO: 4138 - RNA, 22 nt, Artificial Sequence
  Synthetic
uuuucuggacccaggaucuuag

SEQ ID NO: 4139 - RNA, 23 nt, Artificial Sequence
  Synthetic
uuuuucuggacccaggaucuuag

SEQ ID NO: 4140 - RNA, 24 nt, Artificial Sequence
  Synthetic
cuuuuucuggacccaggaucuuag

SEQ ID NO: 4141 - RNA, 18 nt, Artificial Sequence
  Synthetic
uuaacuaugggcucacgg

SEQ ID NO: 4142 - RNA, 19 nt, Artificial Sequence
  Synthetic
uuuaacuaugggcucacgg

SEQ ID NO: 4143 - RNA, 20 nt, Artificial Sequence
  Synthetic
uuuuaacuaugggcucacgg

SEQ ID NO: 4144 - RNA, 21 nt, Artificial Sequence
  Synthetic
guuuuaacuaugggcucacgg

SEQ ID NO: 4145 - RNA, 22 nt, Artificial Sequence
  Synthetic
aguuuuaacuaugggcucacgg

SEQ ID NO: 4146 - RNA, 23 nt, Artificial Sequence
  Synthetic
gaguuuuaacuaugggcucacgg

SEQ ID NO: 4147 - RNA, 24 nt, Artificial Sequence
  Synthetic
agaguuuuaacuaugggcucacgg

SEQ ID NO: 4148 - RNA, 18 nt, Artificial Sequence
  Synthetic
gcugccuagucuaaggug

SEQ ID NO: 4149 - RNA, 19 nt, Artificial Sequence
  Synthetic
agcugccuagucuaaggug

SEQ ID NO: 4150 - RNA, 20 nt, Artificial Sequence
  Synthetic
cagcugccuagucuaaggug

SEQ ID NO: 4151 - RNA, 21 nt, Artificial Sequence
  Synthetic
ucagcugccuagucuaaggug

SEQ ID NO: 4152 - RNA, 22 nt, Artificial Sequence
  Synthetic
cucagcugccuagucuaaggug

SEQ ID NO: 4153 - RNA, 23 nt, Artificial Sequence
  Synthetic
ucucagcugccuagucuaaggug

SEQ ID NO: 4154 - RNA, 24 nt, Artificial Sequence
  Synthetic
cucucagcugccuagucuaaggug

SEQ ID NO: 4155 - RNA, 18 nt, Artificial Sequence
  Synthetic
acaaacuucacagaaaau

SEQ ID NO: 4156 - RNA, 19 nt, Artificial Sequence
  Synthetic
cacaaacuucacagaaaau

SEQ ID NO: 4157 - RNA, 20 nt, Artificial Sequence
  Synthetic
acacaaacuucacagaaaau

SEQ ID NO: 4158 - RNA, 21 nt, Artificial Sequence
  Synthetic
aacacaaacuucacagaaaau

SEQ ID NO: 4159 - RNA, 22 nt, Artificial Sequence
  Synthetic
aaacacaaacuucacagaaaau

SEQ ID NO: 4160 - RNA, 23 nt, Artificial Sequence
  Synthetic
caaacacaaacuucacagaaaau

SEQ ID NO: 4161 - RNA, 24 nt, Artificial Sequence
  Synthetic
acaaacacaaacuucacagaaaau

SEQ ID NO: 4162 - RNA, 18 nt, Artificial Sequence
  Synthetic
agacucacaggguuuaau

SEQ ID NO: 4163 - RNA, 19 nt, Artificial Sequence
  Synthetic
gagacucacaggguuuaau

SEQ ID NO: 4164 - RNA, 20 nt, Artificial Sequence
  Synthetic
ugagacucacaggguuuaau

SEQ ID NO: 4165 - RNA, 21 nt, Artificial Sequence
  Synthetic
uugagacucacaggguuuaau

SEQ ID NO: 4166 - RNA, 22 nt, Artificial Sequence
  Synthetic
uuugagacucacaggguuuaau

SEQ ID NO: 4167 - RNA, 23 nt, Artificial Sequence
  Synthetic
guuugagacucacaggguuuaau

SEQ ID NO: 4168 - RNA, 24 nt, Artificial Sequence
  Synthetic
aguuugagacucacaggguuuaau

SEQ ID NO: 4169 - RNA, 18 nt, Artificial Sequence
  Synthetic
cuuggcgguuggugacau

SEQ ID NO: 4170 - RNA, 19 nt, Artificial Sequence
  Synthetic
ucuuggcgguuggugacau

SEQ ID NO: 4171 - RNA, 20 nt, Artificial Sequence
  Synthetic
cucuuggcgguuggugacau

SEQ ID NO: 4172 - RNA, 21 nt, Artificial Sequence
  Synthetic
ucucuuggcgguuggugacau

SEQ ID NO: 4173 - RNA, 22 nt, Artificial Sequence
  Synthetic
cucucuuggcgguuggugacau

SEQ ID NO: 4174 - RNA, 23 nt, Artificial Sequence
  Synthetic
gcucucuuggcgguuggugacau

SEQ ID NO: 4175 - RNA, 24 nt, Artificial Sequence
  Synthetic
agcucucuuggcgguuggugacau

SEQ ID NO: 4176 - RNA, 18 nt, Artificial Sequence
  Synthetic
uaaucuaucugaagcuau

SEQ ID NO: 4177 - RNA, 19 nt, Artificial Sequence
  Synthetic
auaaucuaucugaagcuau

SEQ ID NO: 4178 - RNA, 20 nt, Artificial Sequence
  Synthetic
uauaaucuaucugaagcuau

SEQ ID NO: 4179 - RNA, 21 nt, Artificial Sequence
  Synthetic
auauaaucuaucugaagcuau

SEQ ID NO: 4180 - RNA, 22 nt, Artificial Sequence
  Synthetic
gauauaaucuaucugaagcuau

SEQ ID NO: 4181 - RNA, 23 nt, Artificial Sequence
  Synthetic
agauauaaucuaucugaagcuau

SEQ ID NO: 4182 - RNA, 24 nt, Artificial Sequence
  Synthetic
cagauauaaucuaucugaagcuau

SEQ ID NO: 4183 - RNA, 18 nt, Artificial Sequence
  Synthetic
acuccagauauaaucuau

SEQ ID NO: 4184 - RNA, 19 nt, Artificial Sequence
  Synthetic
cacuccagauauaaucuau

SEQ ID NO: 4185 - RNA, 20 nt, Artificial Sequence
  Synthetic
ucacuccagauauaaucuau

SEQ ID NO: 4186 - RNA, 21 nt, Artificial Sequence
  Synthetic
uucacuccagauauaaucuau

SEQ ID NO: 4187 - RNA, 22 nt, Artificial Sequence
  Synthetic
cuucacuccagauauaaucuau

SEQ ID NO: 4188 - RNA, 23 nt, Artificial Sequence
  Synthetic
ucuucacuccagauauaaucuau

SEQ ID NO: 4189 - RNA, 24 nt, Artificial Sequence
  Synthetic
uucuucacuccagauauaaucuau

SEQ ID NO: 4190 - RNA, 18 nt, Artificial Sequence
  Synthetic
aaaccaguaagcauuuau

SEQ ID NO: 4191 - RNA, 19 nt, Artificial Sequence
  Synthetic
caaaccaguaagcauuuau

SEQ ID NO: 4192 - RNA, 20 nt, Artificial Sequence
  Synthetic
ucaaaccaguaagcauuuau

SEQ ID NO: 4193 - RNA, 21 nt, Artificial Sequence
  Synthetic
uucaaaccaguaagcauuuau

SEQ ID NO: 4194 - RNA, 22 nt, Artificial Sequence
  Synthetic
cuucaaaccaguaagcauuuau

SEQ ID NO: 4195 - RNA, 23 nt, Artificial Sequence
  Synthetic
ccuucaaaccaguaagcauuuau

SEQ ID NO: 4196 - RNA, 24 nt, Artificial Sequence
  Synthetic
cccuucaaaccaguaagcauuuau

SEQ ID NO: 4197 - RNA, 18 nt, Artificial Sequence
  Synthetic
cucuuaauuguggcaacu

SEQ ID NO: 4198 - RNA, 19 nt, Artificial Sequence
  Synthetic
acucuuaauuguggcaacu

SEQ ID NO: 4199 - RNA, 20 nt, Artificial Sequence
  Synthetic
aacucuuaauuguggcaacu

SEQ ID NO: 4200 - RNA, 21 nt, Artificial Sequence
  Synthetic
caacucuuaauuguggcaacu

SEQ ID NO: 4201 - RNA, 22 nt, Artificial Sequence
  Synthetic
acaacucuuaauuguggcaacu

SEQ ID NO: 4202 - RNA, 23 nt, Artificial Sequence
  Synthetic
gacaacucuuaauuguggcaacu

SEQ ID NO: 4203 - RNA, 24 nt, Artificial Sequence
  Synthetic
ugacaacucuuaauuguggcaacu

SEQ ID NO: 4204 - RNA, 18 nt, Artificial Sequence
  Synthetic
gucuaaagaguuuuaacu

SEQ ID NO: 4205 - RNA, 19 nt, Artificial Sequence
  Synthetic
ugucuaaagaguuuuaacu

SEQ ID NO: 4206 - RNA, 20 nt, Artificial Sequence
  Synthetic
uugucuaaagaguuuuaacu

SEQ ID NO: 4207 - RNA, 21 nt, Artificial Sequence
  Synthetic
guugucuaaagaguuuuaacu

SEQ ID NO: 4208 - RNA, 22 nt, Artificial Sequence
  Synthetic
uguugucuaaagaguuuuaacu

SEQ ID NO: 4209 - RNA, 23 nt, Artificial Sequence
  Synthetic
cuguugucuaaagaguuuuaacu

SEQ ID NO: 4210 - RNA, 24 nt, Artificial Sequence
  Synthetic
ccuguugucuaaagaguuuuaacu

SEQ ID NO: 4211 - RNA, 18 nt, Artificial Sequence
  Synthetic
cgagccacaagaugcccu

SEQ ID NO: 4212 - RNA, 19 nt, Artificial Sequence
  Synthetic
ccgagccacaagaugcccu

SEQ ID NO: 4213 - RNA, 20 nt, Artificial Sequence
  Synthetic
cccgagccacaagaugcccu

SEQ ID NO: 4214 - RNA, 21 nt, Artificial Sequence
  Synthetic
ucccgagccacaagaugcccu

SEQ ID NO: 4215 - RNA, 22 nt, Artificial Sequence
  Synthetic
cucccgagccacaagaugcccu

SEQ ID NO: 4216 - RNA, 23 nt, Artificial Sequence
  Synthetic
acucccgagccacaagaugcccu

SEQ ID NO: 4217 - RNA, 24 nt, Artificial Sequence
  Synthetic
uacucccgagccacaagaugcccu

SEQ ID NO: 4218 - RNA, 18 nt, Artificial Sequence
  Synthetic
uauaaucuaucugaagcu

SEQ ID NO: 4219 - RNA, 19 nt, Artificial Sequence
  Synthetic
auauaaucuaucugaagcu

SEQ ID NO: 4220 - RNA, 20 nt, Artificial Sequence
  Synthetic
gauauaaucuaucugaagcu

SEQ ID NO: 4221 - RNA, 21 nt, Artificial Sequence
  Synthetic
agauauaaucuaucugaagcu

SEQ ID NO: 4222 - RNA, 22 nt, Artificial Sequence
  Synthetic
cagauauaaucuaucugaagcu

SEQ ID NO: 4223 - RNA, 23 nt, Artificial Sequence
  Synthetic
ccagauauaaucuaucugaagcu

SEQ ID NO: 4224 - RNA, 24 nt, Artificial Sequence
  Synthetic
uccagauauaaucuaucugaagcu

SEQ ID NO: 4225 - RNA, 18 nt, Artificial Sequence
  Synthetic
aguauugucagcagagcu

SEQ ID NO: 4226 - RNA, 19 nt, Artificial Sequence
  Synthetic
aaguauugucagcagagcu

SEQ ID NO: 4227 - RNA, 20 nt, Artificial Sequence
  Synthetic
caaguauugucagcagagcu

SEQ ID NO: 4228 - RNA, 21 nt, Artificial Sequence
  Synthetic
ucaaguauugucagcagagcu

SEQ ID NO: 4229 - RNA, 22 nt, Artificial Sequence
  Synthetic
cucaaguauugucagcagagcu

SEQ ID NO: 4230 - RNA, 23 nt, Artificial Sequence
  Synthetic
ucucaaguauugucagcagagcu

SEQ ID NO: 4231 - RNA, 24 nt, Artificial Sequence
  Synthetic
aucucaaguauugucagcagagcu

SEQ ID NO: 4232 - RNA, 18 nt, Artificial Sequence
  Synthetic
cuuuggcuugugaucucu

SEQ ID NO: 4233 - RNA, 19 nt, Artificial Sequence
  Synthetic
gcuuuggcuugugaucucu

SEQ ID NO: 4234 - RNA, 20 nt, Artificial Sequence
  Synthetic
agcuuuggcuugugaucucu

SEQ ID NO: 4235 - RNA, 21 nt, Artificial Sequence
  Synthetic
aagcuuuggcuugugaucucu

SEQ ID NO: 4236 - RNA, 22 nt, Artificial Sequence
  Synthetic
aaagcuuuggcuugugaucucu

SEQ ID NO: 4237 - RNA, 23 nt, Artificial Sequence
  Synthetic
aaaagcuuuggcuugugaucucu

SEQ ID NO: 4238 - RNA, 24 nt, Artificial Sequence
  Synthetic
aaaaagcuuuggcuugugaucucu

SEQ ID NO: 4239 - RNA, 18 nt, Artificial Sequence
  Synthetic
uuaaaaaugagcuuuucu

SEQ ID NO: 4240 - RNA, 19 nt, Artificial Sequence
  Synthetic
auuaaaaaugagcuuuucu

SEQ ID NO: 4241 - RNA, 20 nt, Artificial Sequence
  Synthetic
aauuaaaaaugagcuuuucu

SEQ ID NO: 4242 - RNA, 21 nt, Artificial Sequence
  Synthetic
aaauuaaaaaugagcuuuucu

SEQ ID NO: 4243 - RNA, 22 nt, Artificial Sequence
  Synthetic
aaaauuaaaaaugagcuuuucu

SEQ ID NO: 4244 - RNA, 23 nt, Artificial Sequence
  Synthetic
caaaauuaaaaaugagcuuuucu

SEQ ID NO: 4245 - RNA, 24 nt, Artificial Sequence
  Synthetic
ucaaaauuaaaaaugagcuuuucu

SEQ ID NO: 4246 - RNA, 18 nt, Artificial Sequence
  Synthetic
gucuaaggugcagggagu

SEQ ID NO: 4247 - RNA, 19 nt, Artificial Sequence
  Synthetic
agucuaaggugcagggagu

SEQ ID NO: 4248 - RNA, 20 nt, Artificial Sequence
  Synthetic
uagucuaaggugcagggagu

SEQ ID NO: 4249 - RNA, 21 nt, Artificial Sequence
  Synthetic
cuagucuaaggugcagggagu

SEQ ID NO: 4250 - RNA, 22 nt, Artificial Sequence
  Synthetic
ccuagucuaaggugcagggagu

SEQ ID NO: 4251 - RNA, 23 nt, Artificial Sequence
  Synthetic
gccuagucuaaggugcagggagu

SEQ ID NO: 4252 - RNA, 24 nt, Artificial Sequence
  Synthetic
ugccuagucuaaggugcagggagu

SEQ ID NO: 4253 - RNA, 18 nt, Artificial Sequence
  Synthetic
ucaaaccaguaagcauuu

SEQ ID NO: 4254 - RNA, 19 nt, Artificial Sequence
  Synthetic
uucaaaccaguaagcauuu

SEQ ID NO: 4255 - RNA, 20 nt, Artificial Sequence
  Synthetic
cuucaaaccaguaagcauuu

SEQ ID NO: 4256 - RNA, 21 nt, Artificial Sequence
  Synthetic
ccuucaaaccaguaagcauuu

SEQ ID NO: 4257 - RNA, 22 nt, Artificial Sequence
  Synthetic
cccuucaaaccaguaagcauuu

SEQ ID NO: 4258 - RNA, 23 nt, Artificial Sequence
  Synthetic
gcccuucaaaccaguaagcauuu

SEQ ID NO: 4259 - RNA, 24 nt, Artificial Sequence
  Synthetic
ugcccuucaaaccaguaagcauuu

SEQ ID NO: 4260 - RNA, 18 nt, Artificial Sequence
  Synthetic
cagguuucccaucuuuuu

SEQ ID NO: 4261 - RNA, 19 nt, Artificial Sequence
  Synthetic
acagguuucccaucuuuuu

SEQ ID NO: 4262 - RNA, 20 nt, Artificial Sequence
  Synthetic
aacagguuucccaucuuuuu

SEQ ID NO: 4263 - RNA, 21 nt, Artificial Sequence
  Synthetic
aaacagguuucccaucuuuuu

SEQ ID NO: 4264 - RNA, 22 nt, Artificial Sequence
  Synthetic
uaaacagguuucccaucuuuuu

SEQ ID NO: 4265 - RNA, 23 nt, Artificial Sequence
  Synthetic
cuaaacagguuucccaucuuuuu

SEQ ID NO: 4266 - RNA, 24 nt, Artificial Sequence
  Synthetic
gcuaaacagguuucccaucuuuuu

SEQ ID NO: 4267 - RNA, 17 nt, Artificial Sequence
  Synthetic
auccuuaccucucaaaa

SEQ ID NO: 4268 - RNA, 17 nt, Artificial Sequence
  Synthetic
cuaaaagguuaagaaaa

SEQ ID NO: 4269 - RNA, 17 nt, Artificial Sequence
  Synthetic
agcugcuuggccuguua

SEQ ID NO: 4270 - RNA, 17 nt, Artificial Sequence
  Synthetic
auuacuauccaagaagc

SEQ ID NO: 4271 - RNA, 17 nt, Artificial Sequence
  Synthetic
gugaucuuguacaaauc

SEQ ID NO: 4272 - RNA, 17 nt, Artificial Sequence
  Synthetic
ccgguaaguaaccucuc

SEQ ID NO: 4273 - RNA, 17 nt, Artificial Sequence
  Synthetic
auuuacgggcuuuucuc

SEQ ID NO: 4274 - RNA, 17 nt, Artificial Sequence
  Synthetic
agaccagagaucuauuc

SEQ ID NO: 4275 - RNA, 17 nt, Artificial Sequence
  Synthetic
guucuccuuagcagaag

SEQ ID NO: 4276 - RNA, 17 nt, Artificial Sequence
  Synthetic
aucuuucuuuugagagg

SEQ ID NO: 4277 - RNA, 17 nt, Artificial Sequence
  Synthetic
uuuuauacugucuauau

SEQ ID NO: 4278 - RNA, 17 nt, Artificial Sequence
  Synthetic
uucgccuucaauacacu

SEQ ID NO: 4279 - RNA, 17 nt, Artificial Sequence
  Synthetic
ugacccuuuccuuaucu

SEQ ID NO: 4280 - RNA, 17 nt, Artificial Sequence
  Synthetic
cuacuuuuauacugucu

SEQ ID NO: 4281 - RNA, 17 nt, Artificial Sequence
  Synthetic
uaaaaagaagaacuguu

SEQ ID NO: 4282 - RNA, 17 nt, Artificial Sequence
  Synthetic
ggucugaagguuuauuu

SEQ ID NO: 4283 - RNA, 20 nt, Artificial Sequence
  Synthetic
acaauccuuaccucucaaaa

SEQ ID NO: 4284 - RNA, 20 nt, Artificial Sequence
  Synthetic
aggcuaaaagguuaagaaaa

SEQ ID NO: 4285 - RNA, 20 nt, Artificial Sequence
  Synthetic
uacauuuaaaguugguuuaa

SEQ ID NO: 4286 - RNA, 20 nt, Artificial Sequence
  Synthetic
cucagcugcuuggccuguua

SEQ ID NO: 4287 - RNA, 20 nt, Artificial Sequence
  Synthetic
gaaauuacuauccaagaagc

SEQ ID NO: 4288 - RNA, 20 nt, Artificial Sequence
  Synthetic
ccugugaucuuguacaaauc

SEQ ID NO: 4289 - RNA, 20 nt, Artificial Sequence
  Synthetic
uccccgguaaguaaccucuc

SEQ ID NO: 4290 - RNA, 20 nt, Artificial Sequence
  Synthetic
uuuauuuacgggcuuuucuc

SEQ ID NO: 4291 - RNA, 20 nt, Artificial Sequence
  Synthetic
uucagaccagagaucuauuc

SEQ ID NO: 4292 - RNA, 20 nt, Artificial Sequence
  Synthetic
uuaguucuccuuagcagaag

SEQ ID NO: 4293 - RNA, 20 nt, Artificial Sequence
  Synthetic
gaacaguucuucuuuuuaag

SEQ ID NO: 4294 - RNA, 20 nt, Artificial Sequence
  Synthetic
caaaucuuucuuuugagagg

SEQ ID NO: 4295 - RNA, 20 nt, Artificial Sequence
  Synthetic
uacuuuuauacugucuauau

SEQ ID NO: 4296 - RNA, 20 nt, Artificial Sequence
  Synthetic
cuuuucgccuucaauacacu

SEQ ID NO: 4297 - RNA, 20 nt, Artificial Sequence
  Synthetic
cugugacccuuuccuuaucu

SEQ ID NO: 4298 - RNA, 20 nt, Artificial Sequence
  Synthetic
uuccuacuuuuauacugucu

SEQ ID NO: 4299 - RNA, 20 nt, Artificial Sequence
  Synthetic
ccuuagcagaagauaagauu

SEQ ID NO: 4300 - RNA, 20 nt, Artificial Sequence
  Synthetic
acuuaaaaagaagaacuguu

SEQ ID NO: 4301 - RNA, 20 nt, Artificial Sequence
  Synthetic
ucuggucugaagguuuauuu

SEQ ID NO: 4302 - RNA, 17 nt, Artificial Sequence
  Synthetic
aacaucaaagauacaaa

SEQ ID NO: 4303 - RNA, 17 nt, Artificial Sequence
  Synthetic
auuuaaaguugguuuaa

SEQ ID NO: 4304 - RNA, 17 nt, Artificial Sequence
  Synthetic
ugauuuguacaagauca

SEQ ID NO: 4305 - RNA, 17 nt, Artificial Sequence
  Synthetic
caguucuucuuuuuaag

SEQ ID NO: 4306 - RNA, 17 nt, Artificial Sequence
  Synthetic
auuucuuuuacuaaaau

SEQ ID NO: 4307 - RNA, 17 nt, Artificial Sequence
  Synthetic
uauucuuuauauuuucu

SEQ ID NO: 4308 - RNA, 17 nt, Artificial Sequence
  Synthetic
uagcagaagauaagauu

SEQ ID NO: 4309 - RNA, 20 nt, Artificial Sequence
  Synthetic
uauaacaucaaagauacaaa

SEQ ID NO: 4310 - RNA, 20 nt, Artificial Sequence
  Synthetic
aaaugauuuguacaagauca

SEQ ID NO: 4311 - RNA, 20 nt, Artificial Sequence
  Synthetic
guaauuucuuuuacuaaaau

SEQ ID NO: 4312 - RNA, 20 nt, Artificial Sequence
  Synthetic
cuuuauucuuuauauuuucu

SEQ ID NO: 4313 - RNA, 17 nt, Artificial Sequence
  Synthetic
augguucaaaauuaaaa

SEQ ID NO: 4314 - RNA, 17 nt, Artificial Sequence
  Synthetic
augucaccaaccgccaa

SEQ ID NO: 4315 - RNA, 17 nt, Artificial Sequence
  Synthetic
aauuucucauagcuuca

SEQ ID NO: 4316 - RNA, 17 nt, Artificial Sequence
  Synthetic
accuuggcucuagaaua

SEQ ID NO: 4317 - RNA, 17 nt, Artificial Sequence
  Synthetic
agcucugcugacaauac

SEQ ID NO: 4318 - RNA, 17 nt, Artificial Sequence
  Synthetic
gcucuagaauaaaaagc

SEQ ID NO: 4319 - RNA, 17 nt, Artificial Sequence
  Synthetic
ucuuagagaucacaagc

SEQ ID NO: 4320 - RNA, 17 nt, Artificial Sequence
  Synthetic
uggacccaggaucuuag

SEQ ID NO: 4321 - RNA, 17 nt, Artificial Sequence
  Synthetic
aaacuucacagaaaaug

SEQ ID NO: 4322 - RNA, 17 nt, Artificial Sequence
  Synthetic
ugccagauacauaggug

SEQ ID NO: 4323 - RNA, 17 nt, Artificial Sequence
  Synthetic
auagugugaguccucau

SEQ ID NO: 4324 - RNA, 17 nt, Artificial Sequence
  Synthetic
gagccacaagaugcccu

SEQ ID NO: 4325 - RNA, 17 nt, Artificial Sequence
  Synthetic
ucauguggaaaauuucu

SEQ ID NO: 4326 - RNA, 17 nt, Artificial Sequence
  Synthetic
uaaaaaugagcuuuucu

SEQ ID NO: 4327 - RNA, 17 nt, Artificial Sequence
  Synthetic
auuaauuuugaccauuu

SEQ ID NO: 4328 - RNA, 20 nt, Artificial Sequence
  Synthetic
uuuaugguucaaaauuaaaa

SEQ ID NO: 4329 - RNA, 20 nt, Artificial Sequence
  Synthetic
cagaugucaccaaccgccaa

SEQ ID NO: 4330 - RNA, 20 nt, Artificial Sequence
  Synthetic
gaaaauuucucauagcuuca

SEQ ID NO: 4331 - RNA, 20 nt, Artificial Sequence
  Synthetic
gugaccuuggcucuagaaua

SEQ ID NO: 4332 - RNA, 20 nt, Artificial Sequence
  Synthetic
cucagcucugcugacaauac

SEQ ID NO: 4333 - RNA, 20 nt, Artificial Sequence
  Synthetic
uuggcucuagaauaaaaagc

SEQ ID NO: 4334 - RNA, 20 nt, Artificial Sequence
  Synthetic
ccuucuuagagaucacaagc

SEQ ID NO: 4335 - RNA, 20 nt, Artificial Sequence
  Synthetic
uucuggacccaggaucuuag

SEQ ID NO: 4336 - RNA, 20 nt, Artificial Sequence
  Synthetic
cacaaacuucacagaaaaug

SEQ ID NO: 4337 - RNA, 20 nt, Artificial Sequence
  Synthetic
cuaugccagauacauaggug

SEQ ID NO: 4338 - RNA, 20 nt, Artificial Sequence
  Synthetic
ggcauagugugaguccucau

SEQ ID NO: 4339 - RNA, 20 nt, Artificial Sequence
  Synthetic
cccgagccacaagaugcccu

SEQ ID NO: 4340 - RNA, 20 nt, Artificial Sequence
  Synthetic
augucauguggaaaauuucu

SEQ ID NO: 4341 - RNA, 20 nt, Artificial Sequence
  Synthetic
aauuaaaaaugagcuuuucu

SEQ ID NO: 4342 - RNA, 20 nt, Artificial Sequence
  Synthetic
aauauuaauuuugaccauuu

SEQ ID NO: 4343 - RNA, 17 nt, Artificial Sequence
  Synthetic
acuaugcugccgcccag

SEQ ID NO: 4344 - RNA, 17 nt, Artificial Sequence
  Synthetic
uccuccugacaaucgau

SEQ ID NO: 4345 - RNA, 17 nt, Artificial Sequence
  Synthetic
cuaugcugccgcccagu

SEQ ID NO: 4346 - RNA, 17 nt, Artificial Sequence
  Synthetic
gccgcccagugggacuu

SEQ ID NO: 4347 - RNA, 20 nt, Artificial Sequence
  Synthetic
uugacagggcucuauuuuau

SEQ ID NO: 4348 - RNA, 20 nt, Artificial Sequence
  Synthetic
ucacuaugcugccgcccagu

SEQ ID NO: 4349 - RNA, 17 nt, Artificial Sequence
  Synthetic
uccugauaaacugcaaa

SEQ ID NO: 4350 - RNA, 17 nt, Artificial Sequence
  Synthetic
acuugucaccaccccaa

SEQ ID NO: 4351 - RNA, 17 nt, Artificial Sequence
  Synthetic
gcauagugagcccagaa

SEQ ID NO: 4352 - RNA, 17 nt, Artificial Sequence
  Synthetic
cuuuuuauuuaugcaca

SEQ ID NO: 4353 - RNA, 17 nt, Artificial Sequence
  Synthetic
ugugucaacucuugaca

SEQ ID NO: 4354 - RNA, 17 nt, Artificial Sequence
  Synthetic
uuaaagcaaacacagca

SEQ ID NO: 4355 - RNA, 17 nt, Artificial Sequence
  Synthetic
acauugauuuuuuggca

SEQ ID NO: 4356 - RNA, 17 nt, Artificial Sequence
  Synthetic
accagaucucaaaaaga

SEQ ID NO: 4357 - RNA, 17 nt, Artificial Sequence
  Synthetic
cacaggguggaacaaga

SEQ ID NO: 4358 - RNA, 17 nt, Artificial Sequence
  Synthetic
agaaggggacaguaaga

SEQ ID NO: 4359 - RNA, 17 nt, Artificial Sequence
  Synthetic
agcauagugagcccaga

SEQ ID NO: 4360 - RNA, 17 nt, Artificial Sequence
  Synthetic
gaaaaacaggucagaga

SEQ ID NO: 4361 - RNA, 17 nt, Artificial Sequence
  Synthetic
ugcuuuaaaagccagga

SEQ ID NO: 4362 - RNA, 17 nt, Artificial Sequence
  Synthetic
caguaagaaggaaaaac

SEQ ID NO: 4363 - RNA, 17 nt, Artificial Sequence
  Synthetic
uauuuccaaagucccac

SEQ ID NO: 4364 - RNA, 17 nt, Artificial Sequence
  Synthetic
acuuuuuauuuaugcac

SEQ ID NO: 4365 - RNA, 17 nt, Artificial Sequence
  Synthetic
gccuccgcucuacucac

SEQ ID NO: 4366 - RNA, 17 nt, Artificial Sequence
  Synthetic
augugucaacucuugac

SEQ ID NO: 4367 - RNA, 17 nt, Artificial Sequence
  Synthetic
caucuaccugcucaacc

SEQ ID NO: 4368 - RNA, 17 nt, Artificial Sequence
  Synthetic
gacaaucgauagguacc

SEQ ID NO: 4369 - RNA, 17 nt, Artificial Sequence
  Synthetic
guguuugcgucucuccc

SEQ ID NO: 4370 - RNA, 17 nt, Artificial Sequence
  Synthetic
uguuugcuuuaaaagcc

SEQ ID NO: 4371 - RNA, 17 nt, Artificial Sequence
  Synthetic
cagcauggacgacagcc

SEQ ID NO: 4372 - RNA, 17 nt, Artificial Sequence
  Synthetic
acaggucagagauggcc

SEQ ID NO: 4373 - RNA, 17 nt, Artificial Sequence
  Synthetic
cccaaaggugaccgucc

SEQ ID NO: 4374 - RNA, 17 nt, Artificial Sequence
  Synthetic
cugguaaagaugauucc

SEQ ID NO: 4375 - RNA, 17 nt, Artificial Sequence
  Synthetic
agauggccagguugagc

SEQ ID NO: 4376 - RNA, 17 nt, Artificial Sequence
  Synthetic
gagcggaggcaggaggc

SEQ ID NO: 4377 - RNA, 17 nt, Artificial Sequence
  Synthetic
gugaguagagcggaggc

SEQ ID NO: 4378 - RNA, 17 nt, Artificial Sequence
  Synthetic
cacauugauuuuuuggc

SEQ ID NO: 4379 - RNA, 17 nt, Artificial Sequence
  Synthetic
uuuugugggcaacaugc

SEQ ID NO: 4380 - RNA, 17 nt, Artificial Sequence
  Synthetic
accuucuuuuugagauc

SEQ ID NO: 4381 - RNA, 17 nt, Artificial Sequence
  Synthetic
gccuuuugcaguuuauc

SEQ ID NO: 4382 - RNA, 17 nt, Artificial Sequence
  Synthetic
uuuauaggcuucuucuc

SEQ ID NO: 4383 - RNA, 17 nt, Artificial Sequence
  Synthetic
gguaccuaucgauuguc

SEQ ID NO: 4384 - RNA, 17 nt, Artificial Sequence
  Synthetic
uucuuacuguccccuuc

SEQ ID NO: 4385 - RNA, 17 nt, Artificial Sequence
  Synthetic
cauagugagcccagaag

SEQ ID NO: 4386 - RNA, 17 nt, Artificial Sequence
  Synthetic
aacaccagugaguagag

SEQ ID NO: 4387 - RNA, 17 nt, Artificial Sequence
  Synthetic
aguagagcggaggcagg

SEQ ID NO: 4388 - RNA, 17 nt, Artificial Sequence
  Synthetic
accuaucgauugucagg

SEQ ID NO: 4389 - RNA, 17 nt, Artificial Sequence
  Synthetic
agagcggaggcaggagg

SEQ ID NO: 4390 - RNA, 17 nt, Artificial Sequence
  Synthetic
accagugaguagagcgg

SEQ ID NO: 4391 - RNA, 17 nt, Artificial Sequence
  Synthetic
uuuauuuaugcacaggg

SEQ ID NO: 4392 - RNA, 17 nt, Artificial Sequence
  Synthetic
gacggucaccuuugggg

SEQ ID NO: 4393 - RNA, 17 nt, Artificial Sequence
  Synthetic
uccaaagucccacuggg

SEQ ID NO: 4394 - RNA, 17 nt, Artificial Sequence
  Synthetic
aagugugaucacuuggg

SEQ ID NO: 4395 - RNA, 17 nt, Artificial Sequence
  Synthetic
ugugaucacuugggugg

SEQ ID NO: 4396 - RNA, 17 nt, Artificial Sequence
  Synthetic
ugcaguuuaucaggaug

SEQ ID NO: 4397 - RNA, 17 nt, Artificial Sequence
  Synthetic
caggacggucaccuuug

SEQ ID NO: 4398 - RNA, 17 nt, Artificial Sequence
  Synthetic
guucaucuuugguuuug

SEQ ID NO: 4399 - RNA, 17 nt, Artificial Sequence
  Synthetic
caucaauuauuauacau

SEQ ID NO: 4400 - RNA, 17 nt, Artificial Sequence
  Synthetic
uaauugaugucauagau

SEQ ID NO: 4401 - RNA, 17 nt, Artificial Sequence
  Synthetic
acagggcucuauuuuau

SEQ ID NO: 4402 - RNA, 17 nt, Artificial Sequence
  Synthetic
auuuccaaagucccacu

SEQ ID NO: 4403 - RNA, 17 nt, Artificial Sequence
  Synthetic
ugacaagugugaucacu

SEQ ID NO: 4404 - RNA, 17 nt, Artificial Sequence
  Synthetic
ugguaaagaugauuccu

SEQ ID NO: 4405 - RNA, 17 nt, Artificial Sequence
  Synthetic
ucuuacuguccccuucu

SEQ ID NO: 4406 - RNA, 17 nt, Artificial Sequence
  Synthetic
uucaucuuugguuuugu

SEQ ID NO: 4407 - RNA, 17 nt, Artificial Sequence
  Synthetic
gacaagugugaucacuu

SEQ ID NO: 4408 - RNA, 17 nt, Artificial Sequence
  Synthetic
gccaggacggucaccuu

SEQ ID NO: 4409 - RNA, 17 nt, Artificial Sequence
  Synthetic
ucacugguguucaucuu

SEQ ID NO: 4410 - RNA, 17 nt, Artificial Sequence
  Synthetic
ccaggacggucaccuuu

SEQ ID NO: 4411 - RNA, 17 nt, Artificial Sequence
  Synthetic
gcuucacauugauuuuu

SEQ ID NO: 4412 - RNA, 20 nt, Artificial Sequence
  Synthetic
ucauccugauaaacugcaaa

SEQ ID NO: 4413 - RNA, 20 nt, Artificial Sequence
  Synthetic
cacacuugucaccaccccaa

SEQ ID NO: 4414 - RNA, 20 nt, Artificial Sequence
  Synthetic
gcagcauagugagcccagaa

SEQ ID NO: 4415 - RNA, 20 nt, Artificial Sequence
  Synthetic
caaugugucaacucuugaca

SEQ ID NO: 4416 - RNA, 20 nt, Artificial Sequence
  Synthetic
cuuuuaaagcaaacacagca

SEQ ID NO: 4417 - RNA, 20 nt, Artificial Sequence
  Synthetic
uucacauugauuuuuuggca

SEQ ID NO: 4418 - RNA, 20 nt, Artificial Sequence
  Synthetic
uuuaccagaucucaaaaaga

SEQ ID NO: 4419 - RNA, 20 nt, Artificial Sequence
  Synthetic
augcacaggguggaacaaga

SEQ ID NO: 4420 - RNA, 20 nt, Artificial Sequence
  Synthetic
cccagaaggggacaguaaga

SEQ ID NO: 4421 - RNA, 20 nt, Artificial Sequence
  Synthetic
ggcagcauagugagcccaga

SEQ ID NO: 4422 - RNA, 20 nt, Artificial Sequence
  Synthetic
aaggaaaaacaggucagaga

SEQ ID NO: 4423 - RNA, 20 nt, Artificial Sequence
  Synthetic
guuugcuuuaaaagccagga

SEQ ID NO: 4424 - RNA, 20 nt, Artificial Sequence
  Synthetic
ggacaguaagaaggaaaaac

SEQ ID NO: 4425 - RNA, 20 nt, Artificial Sequence
  Synthetic
uuguauuuccaaagucccac

SEQ ID NO: 4426 - RNA, 20 nt, Artificial Sequence
  Synthetic
ccugccuccgcucuacucac

SEQ ID NO: 4427 - RNA, 20 nt, Artificial Sequence
  Synthetic
acaaugugucaacucuugac

SEQ ID NO: 4428 - RNA, 20 nt, Artificial Sequence
  Synthetic
ugacaucuaccugcucaacc

SEQ ID NO: 4429 - RNA, 20 nt, Artificial Sequence
  Synthetic
ccugacaaucgauagguacc

SEQ ID NO: 4430 - RNA, 20 nt, Artificial Sequence
  Synthetic
gcuguguuugcgucucuccc

SEQ ID NO: 4431 - RNA, 20 nt, Artificial Sequence
  Synthetic
cuguguuugcuuuaaaagcc

SEQ ID NO: 4432 - RNA, 20 nt, Artificial Sequence
  Synthetic
acacagcauggacgacagcc

SEQ ID NO: 4433 - RNA, 20 nt, Artificial Sequence
  Synthetic
aaaacaggucagagauggcc

SEQ ID NO: 4434 - RNA, 20 nt, Artificial Sequence
  Synthetic
caccccaaaggugaccgucc

SEQ ID NO: 4435 - RNA, 20 nt, Artificial Sequence
  Synthetic
gaucugguaaagaugauucc

SEQ ID NO: 4436 - RNA, 20 nt, Artificial Sequence
  Synthetic
cagagauggccagguugagc

SEQ ID NO: 4437 - RNA, 20 nt, Artificial Sequence
  Synthetic
guagagcggaggcaggaggc

SEQ ID NO: 4438 - RNA, 20 nt, Artificial Sequence
  Synthetic
ccagugaguagagcggaggc

SEQ ID NO: 4439 - RNA, 20 nt, Artificial Sequence
  Synthetic
cuucacauugauuuuuuggc

SEQ ID NO: 4440 - RNA, 20 nt, Artificial Sequence
  Synthetic
ugguuuugugggcaacaugc

SEQ ID NO: 4441 - RNA, 20 nt, Artificial Sequence
  Synthetic
aagaccuucuuuuugagauc

SEQ ID NO: 4442 - RNA, 20 nt, Artificial Sequence
  Synthetic
ucagccuuuugcaguuuauc

SEQ ID NO: 4443 - RNA, 20 nt, Artificial Sequence
  Synthetic
uauuuuauaggcuucuucuc

SEQ ID NO: 4444 - RNA, 20 nt, Artificial Sequence
  Synthetic
ccagguaccuaucgauuguc

SEQ ID NO: 4445 - RNA, 20 nt, Artificial Sequence
  Synthetic
uccuucuuacuguccccuuc

SEQ ID NO: 4446 - RNA, 20 nt, Artificial Sequence
  Synthetic
cagcauagugagcccagaag

SEQ ID NO: 4447 - RNA, 20 nt, Artificial Sequence
  Synthetic
cucacuaugcugccgcccag

SEQ ID NO: 4448 - RNA, 20 nt, Artificial Sequence
  Synthetic
augaacaccagugaguagag

SEQ ID NO: 4449 - RNA, 20 nt, Artificial Sequence
  Synthetic
gugaguagagcggaggcagg

SEQ ID NO: 4450 - RNA, 20 nt, Artificial Sequence
  Synthetic
gguaccuaucgauugucagg

SEQ ID NO: 4451 - RNA, 20 nt, Artificial Sequence
  Synthetic
aguagagcggaggcaggagg

SEQ ID NO: 4452 - RNA, 20 nt, Artificial Sequence
  Synthetic
aacaccagugaguagagcgg

SEQ ID NO: 4453 - RNA, 20 nt, Artificial Sequence
  Synthetic
cuuuuuauuuaugcacaggg

SEQ ID NO: 4454 - RNA, 20 nt, Artificial Sequence
  Synthetic
caggacggucaccuuugggg

SEQ ID NO: 4455 - RNA, 20 nt, Artificial Sequence
  Synthetic
auuuccaaagucccacuggg

SEQ ID NO: 4456 - RNA, 20 nt, Artificial Sequence
  Synthetic
gacaagugugaucacuuggg

SEQ ID NO: 4457 - RNA, 20 nt, Artificial Sequence
  Synthetic
aagugugaucacuugggugg

SEQ ID NO: 4458 - RNA, 20 nt, Artificial Sequence
  Synthetic
uuuugcaguuuaucaggaug

SEQ ID NO: 4459 - RNA, 20 nt, Artificial Sequence
  Synthetic
agccaggacggucaccuuug

SEQ ID NO: 4460 - RNA, 20 nt, Artificial Sequence
  Synthetic
gguguucaucuuugguuuug

SEQ ID NO: 4461 - RNA, 20 nt, Artificial Sequence
  Synthetic
ugacaucaauuauuauacau

SEQ ID NO: 4462 - RNA, 20 nt, Artificial Sequence
  Synthetic
uaauaauugaugucauagau

SEQ ID NO: 4463 - RNA, 20 nt, Artificial Sequence
  Synthetic
ucauccuccugacaaucgau

SEQ ID NO: 4464 - RNA, 20 nt, Artificial Sequence
  Synthetic
uguauuuccaaagucccacu

SEQ ID NO: 4465 - RNA, 20 nt, Artificial Sequence
  Synthetic
uggugacaagugugaucacu

SEQ ID NO: 4466 - RNA, 20 nt, Artificial Sequence
  Synthetic
aucugguaaagaugauuccu

SEQ ID NO: 4467 - RNA, 20 nt, Artificial Sequence
  Synthetic
ccuucuuacuguccccuucu

SEQ ID NO: 4468 - RNA, 20 nt, Artificial Sequence
  Synthetic
guguucaucuuugguuuugu

SEQ ID NO: 4469 - RNA, 20 nt, Artificial Sequence
  Synthetic
ggugacaagugugaucacuu

SEQ ID NO: 4470 - RNA, 20 nt, Artificial Sequence
  Synthetic
gcugccgcccagugggacuu

SEQ ID NO: 4471 - RNA, 20 nt, Artificial Sequence
  Synthetic
aaagccaggacggucaccuu

SEQ ID NO: 4472 - RNA, 20 nt, Artificial Sequence
  Synthetic
uacucacugguguucaucuu

SEQ ID NO: 4473 - RNA, 20 nt, Artificial Sequence
  Synthetic
aagccaggacggucaccuuu

SEQ ID NO: 4474 - RNA, 20 nt, Artificial Sequence
  Synthetic
uuugcuucacauugauuuuu

SEQ ID NO: 4475 - RNA, 17 nt, Artificial Sequence
  Synthetic
gaacuucuccccgacaa

SEQ ID NO: 4476 - RNA, 17 nt, Artificial Sequence
  Synthetic
ugagaagaagaggcaca

SEQ ID NO: 4477 - RNA, 17 nt, Artificial Sequence
  Synthetic
ucugugggcuugugaca

SEQ ID NO: 4478 - RNA, 17 nt, Artificial Sequence
  Synthetic
ccugccgcugcuuguca

SEQ ID NO: 4479 - RNA, 17 nt, Artificial Sequence
  Synthetic
accagaucucaaaaaga

SEQ ID NO: 4480 - RNA, 17 nt, Artificial Sequence
  Synthetic
ggaagguguucaggaga

SEQ ID NO: 4481 - RNA, 17 nt, Artificial Sequence
  Synthetic
gccaaagaauuccugga

SEQ ID NO: 4482 - RNA, 17 nt, Artificial Sequence
  Synthetic
aaaauaaacaaucauga

SEQ ID NO: 4483 - RNA, 17 nt, Artificial Sequence
  Synthetic
gacaaaggcauagauga

SEQ ID NO: 4484 - RNA, 17 nt, Artificial Sequence
  Synthetic
aauugauacugacugua

SEQ ID NO: 4485 - RNA, 17 nt, Artificial Sequence
  Synthetic
agaaggacaauguugua

SEQ ID NO: 4486 - RNA, 17 nt, Artificial Sequence
  Synthetic
auugcaguagcucuaac

SEQ ID NO: 4487 - RNA, 17 nt, Artificial Sequence
  Synthetic
guuuacacccgauccac

SEQ ID NO: 4488 - RNA, 17 nt, Artificial Sequence
  Synthetic
augagaagaagaggcac

SEQ ID NO: 4489 - RNA, 17 nt, Artificial Sequence
  Synthetic
ucaggccaaagaauucc

SEQ ID NO: 4490 - RNA, 17 nt, Artificial Sequence
  Synthetic
cugguaaagaugauucc

SEQ ID NO: 4491 - RNA, 17 nt, Artificial Sequence
  Synthetic
ucuccugaacaccuucc

SEQ ID NO: 4492 - RNA, 17 nt, Artificial Sequence
  Synthetic
ccgauccacuggggagc

SEQ ID NO: 4493 - RNA, 17 nt, Artificial Sequence
  Synthetic
ccaugacaagcagcggc

SEQ ID NO: 4494 - RNA, 17 nt, Artificial Sequence
  Synthetic
gauagucaucuuggggc

SEQ ID NO: 4495 - RNA, 17 nt, Artificial Sequence
  Synthetic
cacggacucaagugggc

SEQ ID NO: 4496 - RNA, 17 nt, Artificial Sequence
  Synthetic
guuggaccaagcuaugc

SEQ ID NO: 4497 - RNA, 17 nt, Artificial Sequence
  Synthetic
uggaaaaugagagcugc

SEQ ID NO: 4498 - RNA, 17 nt, Artificial Sequence
  Synthetic
gcucgggagccucuugc

SEQ ID NO: 4499 - RNA, 17 nt, Artificial Sequence
  Synthetic
accuucuuuuugagauc

SEQ ID NO: 4500 - RNA, 17 nt, Artificial Sequence
  Synthetic
cugcuccccaguggauc

SEQ ID NO: 4501 - RNA, 17 nt, Artificial Sequence
  Synthetic
auggucaucugcuacuc

SEQ ID NO: 4502 - RNA, 17 nt, Artificial Sequence
  Synthetic
acugagcuugcucgcuc

SEQ ID NO: 4503 - RNA, 17 nt, Artificial Sequence
  Synthetic
ugacuaucuuuaauguc

SEQ ID NO: 4504 - RNA, 17 nt, Artificial Sequence
  Synthetic
ucaucuaugccuuuguc

SEQ ID NO: 4505 - RNA, 17 nt, Artificial Sequence
  Synthetic
acagucaguaucaauuc

SEQ ID NO: 4506 - RNA, 17 nt, Artificial Sequence
  Synthetic
agcuacugcaauuauuc

SEQ ID NO: 4507 - RNA, 17 nt, Artificial Sequence
  Synthetic
uuguuuauuuucucuuc

SEQ ID NO: 4508 - RNA, 17 nt, Artificial Sequence
  Synthetic
auuccuggaagguguuc

SEQ ID NO: 4509 - RNA, 17 nt, Artificial Sequence
  Synthetic
uucuauuuuccagcaag

SEQ ID NO: 4510 - RNA, 17 nt, Artificial Sequence
  Synthetic
ugugacacggacucaag

SEQ ID NO: 4511 - RNA, 17 nt, Artificial Sequence
  Synthetic
gucgaaaugagaagaag

SEQ ID NO: 4512 - RNA, 17 nt, Artificial Sequence
  Synthetic
uuuggaagaagacuaag

SEQ ID NO: 4513 - RNA, 17 nt, Artificial Sequence
  Synthetic
uauuuccugcuccccag

SEQ ID NO: 4514 - RNA, 17 nt, Artificial Sequence
  Synthetic
augaccaugacaagcag

SEQ ID NO: 4515 - RNA, 17 nt, Artificial Sequence
  Synthetic
caucuaugccuuugucg

SEQ ID NO: 4516 - RNA, 17 nt, Artificial Sequence
  Synthetic
caaaggcauagaugaug

SEQ ID NO: 4517 - RNA, 17 nt, Artificial Sequence
  Synthetic
uuacacccgauccacug

SEQ ID NO: 4518 - RNA, 17 nt, Artificial Sequence
  Synthetic
ggagcaggaaauaucug

SEQ ID NO: 4519 - RNA, 17 nt, Artificial Sequence
  Synthetic
agaggcacagggcugug

SEQ ID NO: 4520 - RNA, 17 nt, Artificial Sequence
  Synthetic
uaaagauagucaucuug

SEQ ID NO: 4521 - RNA, 17 nt, Artificial Sequence
  Synthetic
ccugcuccccaguggau

SEQ ID NO: 4522 - RNA, 17 nt, Artificial Sequence
  Synthetic
acaaaggcauagaugau

SEQ ID NO: 4523 - RNA, 17 nt, Artificial Sequence
  Synthetic
uuuacacccgauccacu

SEQ ID NO: 4524 - RNA, 17 nt, Artificial Sequence
  Synthetic
cauggucaucugcuacu

SEQ ID NO: 4525 - RNA, 17 nt, Artificial Sequence
  Synthetic
ugguaaagaugauuccu

SEQ ID NO: 4526 - RNA, 17 nt, Artificial Sequence
  Synthetic
cugucaccugcauagcu

SEQ ID NO: 4527 - RNA, 17 nt, Artificial Sequence
  Synthetic
aacugagcuugcucgcu

SEQ ID NO: 4528 - RNA, 17 nt, Artificial Sequence
  Synthetic
auuaaagauagucaucu

SEQ ID NO: 4529 - RNA, 17 nt, Artificial Sequence
  Synthetic
caggugacagagacucu

SEQ ID NO: 4530 - RNA, 17 nt, Artificial Sequence
  Synthetic
uguuuauuuucucuucu

SEQ ID NO: 4531 - RNA, 17 nt, Artificial Sequence
  Synthetic
gugacacggacucaagu

SEQ ID NO: 4532 - RNA, 17 nt, Artificial Sequence
  Synthetic
caguagcucuaacaggu

SEQ ID NO: 4533 - RNA, 17 nt, Artificial Sequence
  Synthetic
gagcaggaaauaucugu

SEQ ID NO: 4534 - RNA, 17 nt, Artificial Sequence
  Synthetic
gagaaggacaauguugu

SEQ ID NO: 4535 - RNA, 17 nt, Artificial Sequence
  Synthetic
aucaucuaugccuuugu

SEQ ID NO: 4536 - RNA, 17 nt, Artificial Sequence
  Synthetic
uccuaaaaacucugcuu

SEQ ID NO: 4537 - RNA, 17 nt, Artificial Sequence
  Synthetic
uuaaagauagucaucuu

SEQ ID NO: 4538 - RNA, 17 nt, Artificial Sequence
  Synthetic
aggugacagagacucuu

SEQ ID NO: 4539 - RNA, 17 nt, Artificial Sequence
  Synthetic
accuuccaggaauucuu

SEQ ID NO: 4540 - RNA, 17 nt, Artificial Sequence
  Synthetic
gcauuugcagaagcguu

SEQ ID NO: 4541 - RNA, 17 nt, Artificial Sequence
  Synthetic
guuuggcaaugugcuuu

SEQ ID NO: 4542 - RNA, 17 nt, Artificial Sequence
  Synthetic
accgaagcagaguuuuu

SEQ ID NO: 4543 - RNA, 20 nt, Artificial Sequence
  Synthetic
ucugaacuucuccccgacaa

SEQ ID NO: 4544 - RNA, 20 nt, Artificial Sequence
  Synthetic
aaaugagaagaagaggcaca

SEQ ID NO: 4545 - RNA, 20 nt, Artificial Sequence
  Synthetic
auaucugugggcuugugaca

SEQ ID NO: 4546 - RNA, 20 nt, Artificial Sequence
  Synthetic
gguccugccgcugcuuguca

SEQ ID NO: 4547 - RNA, 20 nt, Artificial Sequence
  Synthetic
uuuaccagaucucaaaaaga

SEQ ID NO: 4548 - RNA, 20 nt, Artificial Sequence
  Synthetic
ccuggaagguguucaggaga

SEQ ID NO: 4549 - RNA, 20 nt, Artificial Sequence
  Synthetic
caggccaaagaauuccugga

SEQ ID NO: 4550 - RNA, 20 nt, Artificial Sequence
  Synthetic
gagaaaauaaacaaucauga

SEQ ID NO: 4551 - RNA, 20 nt, Artificial Sequence
  Synthetic
cccgacaaaggcauagauga

SEQ ID NO: 4552 - RNA, 20 nt, Artificial Sequence
  Synthetic
cagaauugauacugacugua

SEQ ID NO: 4553 - RNA, 20 nt, Artificial Sequence
  Synthetic
aggagaaggacaauguugua

SEQ ID NO: 4554 - RNA, 20 nt, Artificial Sequence
  Synthetic
auaauugcaguagcucuaac

SEQ ID NO: 4555 - RNA, 20 nt, Artificial Sequence
  Synthetic
ucaguuuacacccgauccac

SEQ ID NO: 4556 - RNA, 20 nt, Artificial Sequence
  Synthetic
gaaaugagaagaagaggcac

SEQ ID NO: 4557 - RNA, 20 nt, Artificial Sequence
  Synthetic
uauucaggccaaagaauucc

SEQ ID NO: 4558 - RNA, 20 nt, Artificial Sequence
  Synthetic
gaucugguaaagaugauucc

SEQ ID NO: 4559 - RNA, 20 nt, Artificial Sequence
  Synthetic
ccuucuccugaacaccuucc

SEQ ID NO: 4560 - RNA, 20 nt, Artificial Sequence
  Synthetic
cacccgauccacuggggagc

SEQ ID NO: 4561 - RNA, 20 nt, Artificial Sequence
  Synthetic
ugaccaugacaagcagcggc

SEQ ID NO: 4562 - RNA, 20 nt, Artificial Sequence
  Synthetic
aaagauagucaucuuggggc

SEQ ID NO: 4563 - RNA, 20 nt, Artificial Sequence
  Synthetic
ugacacggacucaagugggc

SEQ ID NO: 4564 - RNA, 20 nt, Artificial Sequence
  Synthetic
cagguuggaccaagcuaugc

SEQ ID NO: 4565 - RNA, 20 nt, Artificial Sequence
  Synthetic
guauggaaaaugagagcugc

SEQ ID NO: 4566 - RNA, 20 nt, Artificial Sequence
  Synthetic
cucgcucgggagccucuugc

SEQ ID NO: 4567 - RNA, 20 nt, Artificial Sequence
  Synthetic
aagaccuucuuuuugagauc

SEQ ID NO: 4568 - RNA, 20 nt, Artificial Sequence
  Synthetic
uuccugcuccccaguggauc

SEQ ID NO: 4569 - RNA, 20 nt, Artificial Sequence
  Synthetic
gucauggucaucugcuacuc

SEQ ID NO: 4570 - RNA, 20 nt, Artificial Sequence
  Synthetic
uaaacugagcuugcucgcuc

SEQ ID NO: 4571 - RNA, 20 nt, Artificial Sequence
  Synthetic
agaugacuaucuuuaauguc

SEQ ID NO: 4572 - RNA, 20 nt, Artificial Sequence
  Synthetic
ccaucaucuaugccuuuguc

SEQ ID NO: 4573 - RNA, 20 nt, Artificial Sequence
  Synthetic
cauacagucaguaucaauuc

SEQ ID NO: 4574 - RNA, 20 nt, Artificial Sequence
  Synthetic
uagagcuacugcaauuauuc

SEQ ID NO: 4575 - RNA, 20 nt, Artificial Sequence
  Synthetic
ugauuguuuauuuucucuuc

SEQ ID NO: 4576 - RNA, 20 nt, Artificial Sequence
  Synthetic
agaauuccuggaagguguuc

SEQ ID NO: 4577 - RNA, 20 nt, Artificial Sequence
  Synthetic
cuguucuauuuuccagcaag

SEQ ID NO: 4578 - RNA, 20 nt, Artificial Sequence
  Synthetic
gcuugugacacggacucaag

SEQ ID NO: 4579 - RNA, 20 nt, Artificial Sequence
  Synthetic
ggugucgaaaugagaagaag

SEQ ID NO: 4580 - RNA, 20 nt, Artificial Sequence
  Synthetic
gcuuuuggaagaagacuaag

SEQ ID NO: 4581 - RNA, 20 nt, Artificial Sequence
  Synthetic
agauauuuccugcuccccag

SEQ ID NO: 4582 - RNA, 20 nt, Artificial Sequence
  Synthetic
cagaugaccaugacaagcag

SEQ ID NO: 4583 - RNA, 20 nt, Artificial Sequence
  Synthetic
caucaucuaugccuuugucg

SEQ ID NO: 4584 - RNA, 20 nt, Artificial Sequence
  Synthetic
cgacaaaggcauagaugaug

SEQ ID NO: 4585 - RNA, 20 nt, Artificial Sequence
  Synthetic
aguuuacacccgauccacug

SEQ ID NO: 4586 - RNA, 20 nt, Artificial Sequence
  Synthetic
uggggagcaggaaauaucug

SEQ ID NO: 4587 - RNA, 20 nt, Artificial Sequence
  Synthetic
agaagaggcacagggcugug

SEQ ID NO: 4588 - RNA, 20 nt, Artificial Sequence
  Synthetic
cauuaaagauagucaucuug

SEQ ID NO: 4589 - RNA, 20 nt, Artificial Sequence
  Synthetic
uuuccugcuccccaguggau

SEQ ID NO: 4590 - RNA, 20 nt, Artificial Sequence
  Synthetic
ccgacaaaggcauagaugau

SEQ ID NO: 4591 - RNA, 20 nt, Artificial Sequence
  Synthetic
caguuuacacccgauccacu

SEQ ID NO: 4592 - RNA, 20 nt, Artificial Sequence
  Synthetic
ugucauggucaucugcuacu

SEQ ID NO: 4593 - RNA, 20 nt, Artificial Sequence
  Synthetic
aucugguaaagaugauuccu

SEQ ID NO: 4594 - RNA, 20 nt, Artificial Sequence
  Synthetic
ucucugucaccugcauagcu

SEQ ID NO: 4595 - RNA, 20 nt, Artificial Sequence
  Synthetic
guaaacugagcuugcucgcu

SEQ ID NO: 4596 - RNA, 20 nt, Artificial Sequence
  Synthetic
gacauuaaagauagucaucu

SEQ ID NO: 4597 - RNA, 20 nt, Artificial Sequence
  Synthetic
augcaggugacagagacucu

SEQ ID NO: 4598 - RNA, 20 nt, Artificial Sequence
  Synthetic
gauuguuuauuuucucuucu

SEQ ID NO: 4599 - RNA, 20 nt, Artificial Sequence
  Synthetic
cuugugacacggacucaagu

SEQ ID NO: 4600 - RNA, 20 nt, Artificial Sequence
  Synthetic
uugcaguagcucuaacaggu

SEQ ID NO: 4601 - RNA, 20 nt, Artificial Sequence
  Synthetic
ggggagcaggaaauaucugu

SEQ ID NO: 4602 - RNA, 20 nt, Artificial Sequence
  Synthetic
caggagaaggacaauguugu

SEQ ID NO: 4603 - RNA, 20 nt, Artificial Sequence
  Synthetic
cccaucaucuaugccuuugu

SEQ ID NO: 4604 - RNA, 20 nt, Artificial Sequence
  Synthetic
gaauccuaaaaacucugcuu

SEQ ID NO: 4605 - RNA, 20 nt, Artificial Sequence
  Synthetic
acauuaaagauagucaucuu

SEQ ID NO: 4606 - RNA, 20 nt, Artificial Sequence
  Synthetic
ugcaggugacagagacucuu

SEQ ID NO: 4607 - RNA, 20 nt, Artificial Sequence
  Synthetic
aacaccuuccaggaauucuu

SEQ ID NO: 4608 - RNA, 20 nt, Artificial Sequence
  Synthetic
acagcauuugcagaagcguu

SEQ ID NO: 4609 - RNA, 20 nt, Artificial Sequence
  Synthetic
agcguuuggcaaugugcuuu

SEQ ID NO: 4610 - RNA, 20 nt, Artificial Sequence
  Synthetic
gacaccgaagcagaguuuuu

SEQ ID NO: 4611 - RNA, 18 nt, Artificial Sequence
  Synthetic
auaaaauagagcccuguc

SEQ ID NO: 4612 - RNA, 19 nt, Artificial Sequence
  Synthetic
uauaaaauagagcccuguc

SEQ ID NO: 4613 - RNA, 20 nt, Artificial Sequence
  Synthetic
cuauaaaauagagcccuguc

SEQ ID NO: 4614 - RNA, 21 nt, Artificial Sequence
  Synthetic
ccuauaaaauagagcccuguc

SEQ ID NO: 4615 - RNA, 22 nt, Artificial Sequence
  Synthetic
gccuauaaaauagagcccuguc

SEQ ID NO: 4616 - RNA, 23 nt, Artificial Sequence
  Synthetic
agccuauaaaauagagcccuguc

SEQ ID NO: 4617 - RNA, 24 nt, Artificial Sequence
  Synthetic
aagccuauaaaauagagcccuguc

SEQ ID NO: 4618 - RNA, 18 nt, Artificial Sequence
  Synthetic
uuugcaguuuaucaggau

SEQ ID NO: 4619 - RNA, 19 nt, Artificial Sequence
  Synthetic
uuuugcaguuuaucaggau

SEQ ID NO: 4620 - RNA, 20 nt, Artificial Sequence
  Synthetic
cuuuugcaguuuaucaggau

SEQ ID NO: 4621 - RNA, 18 nt, Artificial Sequence
  Synthetic
ggugacaagugugaucac

SEQ ID NO: 4622 - RNA, 19 nt, Artificial Sequence
  Synthetic
uggugacaagugugaucac

SEQ ID NO: 4623 - RNA, 20 nt, Artificial Sequence
  Synthetic
guggugacaagugugaucac

SEQ ID NO: 4624 - RNA, 21 nt, Artificial Sequence
  Synthetic
gguggugacaagugugaucac

SEQ ID NO: 4625 - RNA, 22 nt, Artificial Sequence
  Synthetic
ggguggugacaagugugaucac

SEQ ID NO: 4626 - RNA, 23 nt, Artificial Sequence
  Synthetic
gggguggugacaagugugaucac

SEQ ID NO: 4627 - RNA, 24 nt, Artificial Sequence
  Synthetic
ugggguggugacaagugugaucac

SEQ ID NO: 4628 - RNA, 21 nt, Artificial Sequence
  Synthetic
uuaugcacaggguggaacaag

SEQ ID NO: 4629 - RNA, 22 nt, Artificial Sequence
  Synthetic
uuuaugcacaggguggaacaag

SEQ ID NO: 4630 - RNA, 23 nt, Artificial Sequence
  Synthetic
auuuaugcacaggguggaacaag

SEQ ID NO: 4631 - RNA, 24 nt, Artificial Sequence
  Synthetic
uauuuaugcacaggguggaacaag

SEQ ID NO: 4632 - RNA, 18 nt, Artificial Sequence
  Synthetic
aaccaaagaugaacacca

SEQ ID NO: 4633 - RNA, 19 nt, Artificial Sequence
  Synthetic
aaaccaaagaugaacacca

SEQ ID NO: 4634 - RNA, 20 nt, Artificial Sequence
  Synthetic
aaaaccaaagaugaacacca

SEQ ID NO: 4635 - RNA, 21 nt, Artificial Sequence
  Synthetic
caaaaccaaagaugaacacca

SEQ ID NO: 4636 - RNA, 22 nt, Artificial Sequence
  Synthetic
acaaaaccaaagaugaacacca

SEQ ID NO: 4637 - RNA, 23 nt, Artificial Sequence
  Synthetic
cacaaaaccaaagaugaacacca

SEQ ID NO: 4638 - RNA, 24 nt, Artificial Sequence
  Synthetic
ccacaaaaccaaagaugaacacca

SEQ ID NO: 4639 - RNA, 18 nt, Artificial Sequence
  Synthetic
guaccuaucgauugucag

SEQ ID NO: 4640 - RNA, 19 nt, Artificial Sequence
  Synthetic
gguaccuaucgauugucag

SEQ ID NO: 4641 - RNA, 20 nt, Artificial Sequence
  Synthetic
agguaccuaucgauugucag

SEQ ID NO: 4642 - RNA, 21 nt, Artificial Sequence
  Synthetic
cagguaccuaucgauugucag

SEQ ID NO: 4643 - RNA, 22 nt, Artificial Sequence
  Synthetic
ccagguaccuaucgauugucag

SEQ ID NO: 4644 - RNA, 23 nt, Artificial Sequence
  Synthetic
gccagguaccuaucgauugucag

SEQ ID NO: 4645 - RNA, 24 nt, Artificial Sequence
  Synthetic
agccagguaccuaucgauugucag

SEQ ID NO: 4646 - RNA, 21 nt, Artificial Sequence
  Synthetic
ccuuuugcaguuuaucaggau

SEQ ID NO: 4647 - RNA, 22 nt, Artificial Sequence
  Synthetic
gccuuuugcaguuuaucaggau

SEQ ID NO: 4648 - RNA, 23 nt, Artificial Sequence
  Synthetic
agccuuuugcaguuuaucaggau

SEQ ID NO: 4649 - RNA, 24 nt, Artificial Sequence
  Synthetic
cagccuuuugcaguuuaucaggau

SEQ ID NO: 4650 - RNA, 18 nt, Artificial Sequence
  Synthetic
cagccuuuugcaguuuau

SEQ ID NO: 4651 - RNA, 19 nt, Artificial Sequence
  Synthetic
ucagccuuuugcaguuuau

SEQ ID NO: 4652 - RNA, 20 nt, Artificial Sequence
  Synthetic
uucagccuuuugcaguuuau

SEQ ID NO: 4653 - RNA, 21 nt, Artificial Sequence
  Synthetic
cuucagccuuuugcaguuuau

SEQ ID NO: 4654 - RNA, 22 nt, Artificial Sequence
  Synthetic
ucuucagccuuuugcaguuuau

SEQ ID NO: 4655 - RNA, 23 nt, Artificial Sequence
  Synthetic
cucuucagccuuuugcaguuuau

SEQ ID NO: 4656 - RNA, 24 nt, Artificial Sequence
  Synthetic
gcucuucagccuuuugcaguuuau

SEQ ID NO: 4657 - RNA, 18 nt, Artificial Sequence
  Synthetic
uguguuugcgucucuccc

SEQ ID NO: 4658 - RNA, 19 nt, Artificial Sequence
  Synthetic
cuguguuugcgucucuccc

SEQ ID NO: 4659 - RNA, 20 nt, Artificial Sequence
  Synthetic
gcuguguuugcgucucuccc

SEQ ID NO: 4660 - RNA, 21 nt, Artificial Sequence
  Synthetic
ggcuguguuugcgucucuccc

SEQ ID NO: 4661 - RNA, 22 nt, Artificial Sequence
  Synthetic
uggcuguguuugcgucucuccc

SEQ ID NO: 4662 - RNA, 23 nt, Artificial Sequence
  Synthetic
guggcuguguuugcgucucuccc

SEQ ID NO: 4663 - RNA, 24 nt, Artificial Sequence
  Synthetic
gguggcuguguuugcgucucuccc

SEQ ID NO: 4664 - RNA, 18 nt, Artificial Sequence
  Synthetic
uuuuauaggcuucuucuc

SEQ ID NO: 4665 - RNA, 19 nt, Artificial Sequence
  Synthetic
auuuuauaggcuucuucuc

SEQ ID NO: 4666 - RNA, 20 nt, Artificial Sequence
  Synthetic
uauuuuauaggcuucuucuc

SEQ ID NO: 4667 - RNA, 21 nt, Artificial Sequence
  Synthetic
cuauuuuauaggcuucuucuc

SEQ ID NO: 4668 - RNA, 22 nt, Artificial Sequence
  Synthetic
ucuauuuuauaggcuucuucuc

SEQ ID NO: 4669 - RNA, 23 nt, Artificial Sequence
  Synthetic
cucuauuuuauaggcuucuucuc

SEQ ID NO: 4670 - RNA, 24 nt, Artificial Sequence
  Synthetic
gcucuauuuuauaggcuucuucuc

SEQ ID NO: 4671 - RNA, 18 nt, Artificial Sequence
  Synthetic
ugcacaggguggaacaag

SEQ ID NO: 4672 - RNA, 19 nt, Artificial Sequence
  Synthetic
augcacaggguggaacaag

SEQ ID NO: 4673 - RNA, 20 nt, Artificial Sequence
  Synthetic
uaugcacaggguggaacaag

SEQ ID NO: 4674 - RNA, 18 nt, Artificial Sequence
  Synthetic
agccaggacggucaccuu

SEQ ID NO: 4675 - RNA, 19 nt, Artificial Sequence
  Synthetic
aagccaggacggucaccuu

SEQ ID NO: 4676 - RNA, 20 nt, Artificial Sequence
  Synthetic
aaagccaggacggucaccuu

SEQ ID NO: 4677 - RNA, 21 nt, Artificial Sequence
  Synthetic
aaaagccaggacggucaccuu

SEQ ID NO: 4678 - RNA, 22 nt, Artificial Sequence
  Synthetic
uaaaagccaggacggucaccuu

SEQ ID NO: 4679 - RNA, 23 nt, Artificial Sequence
  Synthetic
uuaaaagccaggacggucaccuu

SEQ ID NO: 4680 - RNA, 24 nt, Artificial Sequence
  Synthetic
uuuaaaagccaggacggucaccuu

SEQ ID NO: 4681 - RNA, 18 nt, Artificial Sequence
  Synthetic
gauauuuccugcucccca

SEQ ID NO: 4682 - RNA, 19 nt, Artificial Sequence
  Synthetic
agauauuuccugcucccca

SEQ ID NO: 4683 - RNA, 20 nt, Artificial Sequence
  Synthetic
cagauauuuccugcucccca

SEQ ID NO: 4684 - RNA, 21 nt, Artificial Sequence
  Synthetic
acagauauuuccugcucccca

SEQ ID NO: 4685 - RNA, 22 nt, Artificial Sequence
  Synthetic
cacagauauuuccugcucccca

SEQ ID NO: 4686 - RNA, 23 nt, Artificial Sequence
  Synthetic
ccacagauauuuccugcucccca

SEQ ID NO: 4687 - RNA, 24 nt, Artificial Sequence
  Synthetic
cccacagauauuuccugcucccca

SEQ ID NO: 4688 - RNA, 18 nt, Artificial Sequence
  Synthetic
cugcaauuauucaggcca

SEQ ID NO: 4689 - RNA, 19 nt, Artificial Sequence
  Synthetic
acugcaauuauucaggcca

SEQ ID NO: 4690 - RNA, 20 nt, Artificial Sequence
  Synthetic
uacugcaauuauucaggcca

SEQ ID NO: 4691 - RNA, 21 nt, Artificial Sequence
  Synthetic
cuacugcaauuauucaggcca

SEQ ID NO: 4692 - RNA, 22 nt, Artificial Sequence
  Synthetic
gcuacugcaauuauucaggcca

SEQ ID NO: 4693 - RNA, 23 nt, Artificial Sequence
  Synthetic
agcuacugcaauuauucaggcca

SEQ ID NO: 4694 - RNA, 24 nt, Artificial Sequence
  Synthetic
gagcuacugcaauuauucaggcca

SEQ ID NO: 4695 - RNA, 18 nt, Artificial Sequence
  Synthetic
uuccugcuccccagugga

SEQ ID NO: 4696 - RNA, 19 nt, Artificial Sequence
  Synthetic
uuuccugcuccccagugga

SEQ ID NO: 4697 - RNA, 20 nt, Artificial Sequence
  Synthetic
auuuccugcuccccagugga

SEQ ID NO: 4698 - RNA, 21 nt, Artificial Sequence
  Synthetic
uauuuccugcuccccagugga

SEQ ID NO: 4699 - RNA, 22 nt, Artificial Sequence
  Synthetic
auauuuccugcuccccagugga

SEQ ID NO: 4700 - RNA, 23 nt, Artificial Sequence
  Synthetic
gauauuuccugcuccccagugga

SEQ ID NO: 4701 - RNA, 24 nt, Artificial Sequence
  Synthetic
agauauuuccugcuccccagugga

SEQ ID NO: 4702 - RNA, 18 nt, Artificial Sequence
  Synthetic
cgacaaaggcauagauga

SEQ ID NO: 4703 - RNA, 19 nt, Artificial Sequence
  Synthetic
ccgacaaaggcauagauga

SEQ ID NO: 4704 - RNA, 20 nt, Artificial Sequence
  Synthetic
cccgacaaaggcauagauga

SEQ ID NO: 4705 - RNA, 21 nt, Artificial Sequence
  Synthetic
ccccgacaaaggcauagauga

SEQ ID NO: 4706 - RNA, 22 nt, Artificial Sequence
  Synthetic
uccccgacaaaggcauagauga

SEQ ID NO: 4707 - RNA, 23 nt, Artificial Sequence
  Synthetic
cuccccgacaaaggcauagauga

SEQ ID NO: 4708 - RNA, 24 nt, Artificial Sequence
  Synthetic
ucuccccgacaaaggcauagauga

SEQ ID NO: 4709 - RNA, 18 nt, Artificial Sequence
  Synthetic
gcagcagugcgucauccc

SEQ ID NO: 4710 - RNA, 19 nt, Artificial Sequence
  Synthetic
ugcagcagugcgucauccc

SEQ ID NO: 4711 - RNA, 20 nt, Artificial Sequence
  Synthetic
augcagcagugcgucauccc

SEQ ID NO: 4712 - RNA, 21 nt, Artificial Sequence
  Synthetic
gaugcagcagugcgucauccc

SEQ ID NO: 4713 - RNA, 22 nt, Artificial Sequence
  Synthetic
ugaugcagcagugcgucauccc

SEQ ID NO: 4714 - RNA, 23 nt, Artificial Sequence
  Synthetic
uugaugcagcagugcgucauccc

SEQ ID NO: 4715 - RNA, 24 nt, Artificial Sequence
  Synthetic
guugaugcagcagugcgucauccc

SEQ ID NO: 4716 - RNA, 18 nt, Artificial Sequence
  Synthetic
gcagaguuuuuaggauuc

SEQ ID NO: 4717 - RNA, 19 nt, Artificial Sequence
  Synthetic
agcagaguuuuuaggauuc

SEQ ID NO: 4718 - RNA, 20 nt, Artificial Sequence
  Synthetic
aagcagaguuuuuaggauuc

SEQ ID NO: 4719 - RNA, 21 nt, Artificial Sequence
  Synthetic
gaagcagaguuuuuaggauuc

SEQ ID NO: 4720 - RNA, 22 nt, Artificial Sequence
  Synthetic
cgaagcagaguuuuuaggauuc

SEQ ID NO: 4721 - RNA, 23 nt, Artificial Sequence
  Synthetic
ccgaagcagaguuuuuaggauuc

SEQ ID NO: 4722 - RNA, 24 nt, Artificial Sequence
  Synthetic
accgaagcagaguuuuuaggauuc

SEQ ID NO: 4723 - RNA, 18 nt, Artificial Sequence
  Synthetic
aaugucuggaaauucuuc

SEQ ID NO: 4724 - RNA, 19 nt, Artificial Sequence
  Synthetic
uaaugucuggaaauucuuc

SEQ ID NO: 4725 - RNA, 20 nt, Artificial Sequence
  Synthetic
uuaaugucuggaaauucuuc

SEQ ID NO: 4726 - RNA, 21 nt, Artificial Sequence
  Synthetic
uuuaaugucuggaaauucuuc

SEQ ID NO: 4727 - RNA, 22 nt, Artificial Sequence
  Synthetic
cuuuaaugucuggaaauucuuc

SEQ ID NO: 4728 - RNA, 23 nt, Artificial Sequence
  Synthetic
ucuuuaaugucuggaaauucuuc

SEQ ID NO: 4729 - RNA, 24 nt, Artificial Sequence
  Synthetic
aucuuuaaugucuggaaauucuuc

SEQ ID NO: 4730 - RNA, 18 nt, Artificial Sequence
  Synthetic
cucauuucgacaccgaag

SEQ ID NO: 4731 - RNA, 19 nt, Artificial Sequence
  Synthetic
ucucauuucgacaccgaag

SEQ ID NO: 4732 - RNA, 20 nt, Artificial Sequence
  Synthetic
uucucauuucgacaccgaag

SEQ ID NO: 4733 - RNA, 21 nt, Artificial Sequence
  Synthetic
cuucucauuucgacaccgaag

SEQ ID NO: 4734 - RNA, 22 nt, Artificial Sequence
  Synthetic
ucuucucauuucgacaccgaag

SEQ ID NO: 4735 - RNA, 23 nt, Artificial Sequence
  Synthetic
uucuucucauuucgacaccgaag

SEQ ID NO: 4736 - RNA, 24 nt, Artificial Sequence
  Synthetic
cuucuucucauuucgacaccgaag

SEQ ID NO: 4737 - RNA, 18 nt, Artificial Sequence
  Synthetic
acaccgaagcagaguuuu

SEQ ID NO: 4738 - RNA, 19 nt, Artificial Sequence
  Synthetic
gacaccgaagcagaguuuu

SEQ ID NO: 4739 - RNA, 20 nt, Artificial Sequence
  Synthetic
cgacaccgaagcagaguuuu

SEQ ID NO: 4740 - RNA, 21 nt, Artificial Sequence
  Synthetic
ucgacaccgaagcagaguuuu

SEQ ID NO: 4741 - RNA, 22 nt, Artificial Sequence
  Synthetic
uucgacaccgaagcagaguuuu

SEQ ID NO: 4742 - RNA, 23 nt, Artificial Sequence
  Synthetic
uuucgacaccgaagcagaguuuu

SEQ ID NO: 4743 - RNA, 24 nt, Artificial Sequence
  Synthetic
auuucgacaccgaagcagaguuuu

SEQ ID NO: 4744 - RNA, 18 nt, Artificial Sequence
  Synthetic
uucuccugaacaccuucc

SEQ ID NO: 4745 - RNA, 19 nt, Artificial Sequence
  Synthetic
cuucuccugaacaccuucc

SEQ ID NO: 4746 - RNA, 20 nt, Artificial Sequence
  Synthetic
ccuucuccugaacaccuucc

SEQ ID NO: 4747 - RNA, 21 nt, Artificial Sequence
  Synthetic
uccuucuccugaacaccuucc

SEQ ID NO: 4748 - RNA, 22 nt, Artificial Sequence
  Synthetic
guccuucuccugaacaccuucc

SEQ ID NO: 4749 - RNA, 23 nt, Artificial Sequence
  Synthetic
uguccuucuccugaacaccuucc

SEQ ID NO: 4750 - RNA, 24 nt, Artificial Sequence
  Synthetic
uuguccuucuccugaacaccuucc

SEQ ID NO: 4751 - RNA, 18 nt, Artificial Sequence
  Synthetic
uuccaggaauucuuuggc

SEQ ID NO: 4752 - RNA, 19 nt, Artificial Sequence
  Synthetic
cuuccaggaauucuuuggc

SEQ ID NO: 4753 - RNA, 20 nt, Artificial Sequence
  Synthetic
ccuuccaggaauucuuuggc

SEQ ID NO: 4754 - RNA, 21 nt, Artificial Sequence
  Synthetic
accuuccaggaauucuuuggc

SEQ ID NO: 4755 - RNA, 22 nt, Artificial Sequence
  Synthetic
caccuuccaggaauucuuuggc

SEQ ID NO: 4756 - RNA, 23 nt, Artificial Sequence
  Synthetic
acaccuuccaggaauucuuuggc

SEQ ID NO: 4757 - RNA, 24 nt, Artificial Sequence
  Synthetic
aacaccuuccaggaauucuuuggc

SEQ ID NO: 4758 - RNA, 18 nt, Artificial Sequence
  Synthetic
cauggucaucugcuacuc

SEQ ID NO: 4759 - RNA, 19 nt, Artificial Sequence
  Synthetic
ucauggucaucugcuacuc

SEQ ID NO: 4760 - RNA, 20 nt, Artificial Sequence
  Synthetic
gucauggucaucugcuacuc

SEQ ID NO: 4761 - RNA, 21 nt, Artificial Sequence
  Synthetic
ugucauggucaucugcuacuc

SEQ ID NO: 4762 - RNA, 22 nt, Artificial Sequence
  Synthetic
uugucauggucaucugcuacuc

SEQ ID NO: 4763 - RNA, 23 nt, Artificial Sequence
  Synthetic
cuugucauggucaucugcuacuc

SEQ ID NO: 4764 - RNA, 24 nt, Artificial Sequence
  Synthetic
gcuugucauggucaucugcuacuc

SEQ ID NO: 4765 - RNA, 18 nt, Artificial Sequence
  Synthetic
agucaguaucaauucugg

SEQ ID NO: 4766 - RNA, 19 nt, Artificial Sequence
  Synthetic
cagucaguaucaauucugg

SEQ ID NO: 4767 - RNA, 20 nt, Artificial Sequence
  Synthetic
acagucaguaucaauucugg

SEQ ID NO: 4768 - RNA, 21 nt, Artificial Sequence
  Synthetic
uacagucaguaucaauucugg

SEQ ID NO: 4769 - RNA, 22 nt, Artificial Sequence
  Synthetic
auacagucaguaucaauucugg

SEQ ID NO: 4770 - RNA, 23 nt, Artificial Sequence
  Synthetic
cauacagucaguaucaauucugg

SEQ ID NO: 4771 - RNA, 24 nt, Artificial Sequence
  Synthetic
ccauacagucaguaucaauucugg

SEQ ID NO: 4772 - RNA, 18 nt, Artificial Sequence
  Synthetic
gcaggugacagagacucu

SEQ ID NO: 4773 - RNA, 19 nt, Artificial Sequence
  Synthetic
ugcaggugacagagacucu

SEQ ID NO: 4774 - RNA, 20 nt, Artificial Sequence
  Synthetic
augcaggugacagagacucu

SEQ ID NO: 4775 - RNA, 21 nt, Artificial Sequence
  Synthetic
uaugcaggugacagagacucu

SEQ ID NO: 4776 - RNA, 22 nt, Artificial Sequence
  Synthetic
cuaugcaggugacagagacucu

SEQ ID NO: 4777 - RNA, 23 nt, Artificial Sequence
  Synthetic
gcuaugcaggugacagagacucu

SEQ ID NO: 4778 - RNA, 24 nt, Artificial Sequence
  Synthetic
agcuaugcaggugacagagacucu

SEQ ID NO: 4779 - RNA, 18 nt, Artificial Sequence
  Synthetic
gagaagaagccuauaaaa

SEQ ID NO: 4780 - RNA, 19 nt, Artificial Sequence
  Synthetic
agagaagaagccuauaaaa

SEQ ID NO: 4781 - RNA, 20 nt, Artificial Sequence
  Synthetic
cagagaagaagccuauaaaa

SEQ ID NO: 4782 - RNA, 21 nt, Artificial Sequence
  Synthetic
ccagagaagaagccuauaaaa

SEQ ID NO: 4783 - RNA, 22 nt, Artificial Sequence
  Synthetic
uccagagaagaagccuauaaaa

SEQ ID NO: 4784 - RNA, 23 nt, Artificial Sequence
  Synthetic
uuccagagaagaagccuauaaaa

SEQ ID NO: 4785 - RNA, 24 nt, Artificial Sequence
  Synthetic
auuccagagaagaagccuauaaaa

SEQ ID NO: 4786 - RNA, 18 nt, Artificial Sequence
  Synthetic
agcauagugagcccagaa

SEQ ID NO: 4787 - RNA, 19 nt, Artificial Sequence
  Synthetic
cagcauagugagcccagaa

SEQ ID NO: 4788 - RNA, 20 nt, Artificial Sequence
  Synthetic
gcagcauagugagcccagaa

SEQ ID NO: 4789 - RNA, 21 nt, Artificial Sequence
  Synthetic
ggcagcauagugagcccagaa

SEQ ID NO: 4790 - RNA, 22 nt, Artificial Sequence
  Synthetic
cggcagcauagugagcccagaa

SEQ ID NO: 4791 - RNA, 23 nt, Artificial Sequence
  Synthetic
gcggcagcauagugagcccagaa

SEQ ID NO: 4792 - RNA, 24 nt, Artificial Sequence
  Synthetic
ggcggcagcauagugagcccagaa

SEQ ID NO: 4793 - RNA, 18 nt, Artificial Sequence
  Synthetic
uguauuuccaaaguccca

SEQ ID NO: 4794 - RNA, 19 nt, Artificial Sequence
  Synthetic
uuguauuuccaaaguccca

SEQ ID NO: 4795 - RNA, 20 nt, Artificial Sequence
  Synthetic
auuguauuuccaaaguccca

SEQ ID NO: 4796 - RNA, 21 nt, Artificial Sequence
  Synthetic
cauuguauuuccaaaguccca

SEQ ID NO: 4797 - RNA, 22 nt, Artificial Sequence
  Synthetic
acauuguauuuccaaaguccca

SEQ ID NO: 4798 - RNA, 23 nt, Artificial Sequence
  Synthetic
cacauuguauuuccaaaguccca

SEQ ID NO: 4799 - RNA, 24 nt, Artificial Sequence
  Synthetic
acacauuguauuuccaaaguccca

SEQ ID NO: 4800 - RNA, 18 nt, Artificial Sequence
  Synthetic
augaugaagaagauucca

SEQ ID NO: 4801 - RNA, 19 nt, Artificial Sequence
  Synthetic
gaugaugaagaagauucca

SEQ ID NO: 4802 - RNA, 20 nt, Artificial Sequence
  Synthetic
ggaugaugaagaagauucca

SEQ ID NO: 4803 - RNA, 21 nt, Artificial Sequence
  Synthetic
aggaugaugaagaagauucca

SEQ ID NO: 4804 - RNA, 22 nt, Artificial Sequence
  Synthetic
gaggaugaugaagaagauucca

SEQ ID NO: 4805 - RNA, 23 nt, Artificial Sequence
  Synthetic
ggaggaugaugaagaagauucca

SEQ ID NO: 4806 - RNA, 24 nt, Artificial Sequence
  Synthetic
aggaggaugaugaagaagauucca

SEQ ID NO: 4807 - RNA, 18 nt, Artificial Sequence
  Synthetic
cagaaggggacaguaaga

SEQ ID NO: 4808 - RNA, 19 nt, Artificial Sequence
  Synthetic
ccagaaggggacaguaaga

SEQ ID NO: 4809 - RNA, 20 nt, Artificial Sequence
  Synthetic
cccagaaggggacaguaaga

SEQ ID NO: 4810 - RNA, 21 nt, Artificial Sequence
  Synthetic
gcccagaaggggacaguaaga

SEQ ID NO: 4811 - RNA, 22 nt, Artificial Sequence
  Synthetic
agcccagaaggggacaguaaga

SEQ ID NO: 4812 - RNA, 23 nt, Artificial Sequence
  Synthetic
gagcccagaaggggacaguaaga

SEQ ID NO: 4813 - RNA, 24 nt, Artificial Sequence
  Synthetic
ugagcccagaaggggacaguaaga

SEQ ID NO: 4814 - RNA, 18 nt, Artificial Sequence
  Synthetic
cagcauagugagcccaga

SEQ ID NO: 4815 - RNA, 19 nt, Artificial Sequence
  Synthetic
gcagcauagugagcccaga

SEQ ID NO: 4816 - RNA, 20 nt, Artificial Sequence
  Synthetic
ggcagcauagugagcccaga

SEQ ID NO: 4817 - RNA, 21 nt, Artificial Sequence
  Synthetic
cggcagcauagugagcccaga

SEQ ID NO: 4818 - RNA, 22 nt, Artificial Sequence
  Synthetic
gcggcagcauagugagcccaga

SEQ ID NO: 4819 - RNA, 23 nt, Artificial Sequence
  Synthetic
ggcggcagcauagugagcccaga

SEQ ID NO: 4820 - RNA, 24 nt, Artificial Sequence
  Synthetic
gggcggcagcauagugagcccaga

SEQ ID NO: 4821 - RNA, 18 nt, Artificial Sequence
  Synthetic
aauaauugaugucauaga

SEQ ID NO: 4822 - RNA, 19 nt, Artificial Sequence
  Synthetic
uaauaauugaugucauaga

SEQ ID NO: 4823 - RNA, 20 nt, Artificial Sequence
  Synthetic
auaauaauugaugucauaga

SEQ ID NO: 4824 - RNA, 21 nt, Artificial Sequence
  Synthetic
uauaauaauugaugucauaga

SEQ ID NO: 4825 - RNA, 22 nt, Artificial Sequence
  Synthetic
guauaauaauugaugucauaga

SEQ ID NO: 4826 - RNA, 23 nt, Artificial Sequence
  Synthetic
uguauaauaauugaugucauaga

SEQ ID NO: 4827 - RNA, 24 nt, Artificial Sequence
  Synthetic
auguauaauaauugaugucauaga

SEQ ID NO: 4828 - RNA, 18 nt, Artificial Sequence
  Synthetic
ugaacaccagugaguaga

SEQ ID NO: 4829 - RNA, 19 nt, Artificial Sequence
  Synthetic
augaacaccagugaguaga

SEQ ID NO: 4830 - RNA, 20 nt, Artificial Sequence
  Synthetic
gaugaacaccagugaguaga

SEQ ID NO: 4831 - RNA, 21 nt, Artificial Sequence
  Synthetic
agaugaacaccagugaguaga

SEQ ID NO: 4832 - RNA, 22 nt, Artificial Sequence
  Synthetic
aagaugaacaccagugaguaga

SEQ ID NO: 4833 - RNA, 23 nt, Artificial Sequence
  Synthetic
aaagaugaacaccagugaguaga

SEQ ID NO: 4834 - RNA, 24 nt, Artificial Sequence
  Synthetic
caaagaugaacaccagugaguaga

SEQ ID NO: 4835 - RNA, 18 nt, Artificial Sequence
  Synthetic
ccacugggcggcagcaua

SEQ ID NO: 4836 - RNA, 19 nt, Artificial Sequence
  Synthetic
cccacugggcggcagcaua

SEQ ID NO: 4837 - RNA, 20 nt, Artificial Sequence
  Synthetic
ucccacugggcggcagcaua

SEQ ID NO: 4838 - RNA, 21 nt, Artificial Sequence
  Synthetic
gucccacugggcggcagcaua

SEQ ID NO: 4839 - RNA, 22 nt, Artificial Sequence
  Synthetic
agucccacugggcggcagcaua

SEQ ID NO: 4840 - RNA, 23 nt, Artificial Sequence
  Synthetic
aagucccacugggcggcagcaua

SEQ ID NO: 4841 - RNA, 24 nt, Artificial Sequence
  Synthetic
aaagucccacugggcggcagcaua

SEQ ID NO: 4842 - RNA, 18 nt, Artificial Sequence
  Synthetic
gcggcagcauagugagcc

SEQ ID NO: 4843 - RNA, 19 nt, Artificial Sequence
  Synthetic
ggcggcagcauagugagcc

SEQ ID NO: 4844 - RNA, 20 nt, Artificial Sequence
  Synthetic
gggcggcagcauagugagcc

SEQ ID NO: 4845 - RNA, 21 nt, Artificial Sequence
  Synthetic
ugggcggcagcauagugagcc

SEQ ID NO: 4846 - RNA, 22 nt, Artificial Sequence
  Synthetic
cugggcggcagcauagugagcc

SEQ ID NO: 4847 - RNA, 23 nt, Artificial Sequence
  Synthetic
acugggcggcagcauagugagcc

SEQ ID NO: 4848 - RNA, 24 nt, Artificial Sequence
  Synthetic
cacugggcggcagcauagugagcc

SEQ ID NO: 4849 - RNA, 18 nt, Artificial Sequence
  Synthetic
ucugguaaagaugauucc

SEQ ID NO: 4850 - RNA, 19 nt, Artificial Sequence
  Synthetic
aucugguaaagaugauucc

SEQ ID NO: 4851 - RNA, 20 nt, Artificial Sequence
  Synthetic
gaucugguaaagaugauucc

SEQ ID NO: 4852 - RNA, 21 nt, Artificial Sequence
  Synthetic
agaucugguaaagaugauucc

SEQ ID NO: 4853 - RNA, 22 nt, Artificial Sequence
  Synthetic
gagaucugguaaagaugauucc

SEQ ID NO: 4854 - RNA, 23 nt, Artificial Sequence
  Synthetic
ugagaucugguaaagaugauucc

SEQ ID NO: 4855 - RNA, 24 nt, Artificial Sequence
  Synthetic
uugagaucugguaaagaugauucc

SEQ ID NO: 4856 - RNA, 18 nt, Artificial Sequence
  Synthetic
uuuuaaagcaaacacagc

SEQ ID NO: 4857 - RNA, 19 nt, Artificial Sequence
  Synthetic
cuuuuaaagcaaacacagc

SEQ ID NO: 4858 - RNA, 20 nt, Artificial Sequence
  Synthetic
gcuuuuaaagcaaacacagc

SEQ ID NO: 4859 - RNA, 21 nt, Artificial Sequence
  Synthetic
ggcuuuuaaagcaaacacagc

SEQ ID NO: 4860 - RNA, 22 nt, Artificial Sequence
  Synthetic
uggcuuuuaaagcaaacacagc

SEQ ID NO: 4861 - RNA, 23 nt, Artificial Sequence
  Synthetic
cuggcuuuuaaagcaaacacagc

SEQ ID NO: 4862 - RNA, 24 nt, Artificial Sequence
  Synthetic
ccuggcuuuuaaagcaaacacagc

SEQ ID NO: 4863 - RNA, 18 nt, Artificial Sequence
  Synthetic
agugaguagagcggaggc

SEQ ID NO: 4864 - RNA, 19 nt, Artificial Sequence
  Synthetic
cagugaguagagcggaggc

SEQ ID NO: 4865 - RNA, 20 nt, Artificial Sequence
  Synthetic
ccagugaguagagcggaggc

SEQ ID NO: 4866 - RNA, 21 nt, Artificial Sequence
  Synthetic
accagugaguagagcggaggc

SEQ ID NO: 4867 - RNA, 22 nt, Artificial Sequence
  Synthetic
caccagugaguagagcggaggc

SEQ ID NO: 4868 - RNA, 23 nt, Artificial Sequence
  Synthetic
acaccagugaguagagcggaggc

SEQ ID NO: 4869 - RNA, 24 nt, Artificial Sequence
  Synthetic
aacaccagugaguagagcggaggc

SEQ ID NO: 4870 - RNA, 18 nt, Artificial Sequence
  Synthetic
agguaccuaucgauuguc

SEQ ID NO: 4871 - RNA, 19 nt, Artificial Sequence
  Synthetic
cagguaccuaucgauuguc

SEQ ID NO: 4872 - RNA, 20 nt, Artificial Sequence
  Synthetic
ccagguaccuaucgauuguc

SEQ ID NO: 4873 - RNA, 21 nt, Artificial Sequence
  Synthetic
gccagguaccuaucgauuguc

SEQ ID NO: 4874 - RNA, 22 nt, Artificial Sequence
  Synthetic
agccagguaccuaucgauuguc

SEQ ID NO: 4875 - RNA, 23 nt, Artificial Sequence
  Synthetic
cagccagguaccuaucgauuguc

SEQ ID NO: 4876 - RNA, 24 nt, Artificial Sequence
  Synthetic
acagccagguaccuaucgauuguc

SEQ ID NO: 4877 - RNA, 18 nt, Artificial Sequence
  Synthetic
ggaugaugaagaagauuc

SEQ ID NO: 4878 - RNA, 19 nt, Artificial Sequence
  Synthetic
aggaugaugaagaagauuc

SEQ ID NO: 4879 - RNA, 20 nt, Artificial Sequence
  Synthetic
gaggaugaugaagaagauuc

SEQ ID NO: 4880 - RNA, 21 nt, Artificial Sequence
  Synthetic
ggaggaugaugaagaagauuc

SEQ ID NO: 4881 - RNA, 22 nt, Artificial Sequence
  Synthetic
aggaggaugaugaagaagauuc

SEQ ID NO: 4882 - RNA, 23 nt, Artificial Sequence
  Synthetic
caggaggaugaugaagaagauuc

SEQ ID NO: 4883 - RNA, 24 nt, Artificial Sequence
  Synthetic
ucaggaggaugaugaagaagauuc

SEQ ID NO: 4884 - RNA, 18 nt, Artificial Sequence
  Synthetic
aucugguaaagaugauuc

SEQ ID NO: 4885 - RNA, 19 nt, Artificial Sequence
  Synthetic
gaucugguaaagaugauuc

SEQ ID NO: 4886 - RNA, 20 nt, Artificial Sequence
  Synthetic
agaucugguaaagaugauuc

SEQ ID NO: 4887 - RNA, 21 nt, Artificial Sequence
  Synthetic
gagaucugguaaagaugauuc

SEQ ID NO: 4888 - RNA, 22 nt, Artificial Sequence
  Synthetic
ugagaucugguaaagaugauuc

SEQ ID NO: 4889 - RNA, 23 nt, Artificial Sequence
  Synthetic
uugagaucugguaaagaugauuc

SEQ ID NO: 4890 - RNA, 24 nt, Artificial Sequence
  Synthetic
uuugagaucugguaaagaugauuc

SEQ ID NO: 4891 - RNA, 18 nt, Artificial Sequence
  Synthetic
uugcccacaaaaccaaag

SEQ ID NO: 4892 - RNA, 19 nt, Artificial Sequence
  Synthetic
guugcccacaaaaccaaag

SEQ ID NO: 4893 - RNA, 20 nt, Artificial Sequence
  Synthetic
uguugcccacaaaaccaaag

SEQ ID NO: 4894 - RNA, 21 nt, Artificial Sequence
  Synthetic
auguugcccacaaaaccaaag

SEQ ID NO: 4895 - RNA, 22 nt, Artificial Sequence
  Synthetic
cauguugcccacaaaaccaaag

SEQ ID NO: 4896 - RNA, 23 nt, Artificial Sequence
  Synthetic
gcauguugcccacaaaaccaaag

SEQ ID NO: 4897 - RNA, 24 nt, Artificial Sequence
  Synthetic
agcauguugcccacaaaaccaaag

SEQ ID NO: 4898 - RNA, 18 nt, Artificial Sequence
  Synthetic
ccagaaggggacaguaag

SEQ ID NO: 4899 - RNA, 19 nt, Artificial Sequence
  Synthetic
cccagaaggggacaguaag

SEQ ID NO: 4900 - RNA, 20 nt, Artificial Sequence
  Synthetic
gcccagaaggggacaguaag

SEQ ID NO: 4901 - RNA, 21 nt, Artificial Sequence
  Synthetic
agcccagaaggggacaguaag

SEQ ID NO: 4902 - RNA, 22 nt, Artificial Sequence
  Synthetic
gagcccagaaggggacaguaag

SEQ ID NO: 4903 - RNA, 23 nt, Artificial Sequence
  Synthetic
ugagcccagaaggggacaguaag

SEQ ID NO: 4904 - RNA, 24 nt, Artificial Sequence
  Synthetic
gugagcccagaaggggacaguaag

SEQ ID NO: 4905 - RNA, 18 nt, Artificial Sequence
  Synthetic
gcagcauagugagcccag

SEQ ID NO: 4906 - RNA, 19 nt, Artificial Sequence
  Synthetic
ggcagcauagugagcccag

SEQ ID NO: 4907 - RNA, 20 nt, Artificial Sequence
  Synthetic
cggcagcauagugagcccag

SEQ ID NO: 4908 - RNA, 21 nt, Artificial Sequence
  Synthetic
gcggcagcauagugagcccag

SEQ ID NO: 4909 - RNA, 22 nt, Artificial Sequence
  Synthetic
ggcggcagcauagugagcccag

SEQ ID NO: 4910 - RNA, 23 nt, Artificial Sequence
  Synthetic
gggcggcagcauagugagcccag

SEQ ID NO: 4911 - RNA, 24 nt, Artificial Sequence
  Synthetic
ugggcggcagcauagugagcccag

SEQ ID NO: 4912 - RNA, 18 nt, Artificial Sequence
  Synthetic
augaagaagauuccagag

SEQ ID NO: 4913 - RNA, 19 nt, Artificial Sequence
  Synthetic
gaugaagaagauuccagag

SEQ ID NO: 4914 - RNA, 20 nt, Artificial Sequence
  Synthetic
ugaugaagaagauuccagag

SEQ ID NO: 4915 - RNA, 21 nt, Artificial Sequence
  Synthetic
augaugaagaagauuccagag

SEQ ID NO: 4916 - RNA, 22 nt, Artificial Sequence
  Synthetic
gaugaugaagaagauuccagag

SEQ ID NO: 4917 - RNA, 23 nt, Artificial Sequence
  Synthetic
ggaugaugaagaagauuccagag

SEQ ID NO: 4918 - RNA, 24 nt, Artificial Sequence
  Synthetic
aggaugaugaagaagauuccagag

SEQ ID NO: 4919 - RNA, 18 nt, Artificial Sequence
  Synthetic
gaacaccagugaguagag

SEQ ID NO: 4920 - RNA, 19 nt, Artificial Sequence
  Synthetic
ugaacaccagugaguagag

SEQ ID NO: 4921 - RNA, 20 nt, Artificial Sequence
  Synthetic
augaacaccagugaguagag

SEQ ID NO: 4922 - RNA, 21 nt, Artificial Sequence
  Synthetic
gaugaacaccagugaguagag

SEQ ID NO: 4923 - RNA, 22 nt, Artificial Sequence
  Synthetic
agaugaacaccagugaguagag

SEQ ID NO: 4924 - RNA, 23 nt, Artificial Sequence
  Synthetic
aagaugaacaccagugaguagag

SEQ ID NO: 4925 - RNA, 24 nt, Artificial Sequence
  Synthetic
aaagaugaacaccagugaguagag

SEQ ID NO: 4926 - RNA, 18 nt, Artificial Sequence
  Synthetic
guagagcggaggcaggag

SEQ ID NO: 4927 - RNA, 19 nt, Artificial Sequence
  Synthetic
aguagagcggaggcaggag

SEQ ID NO: 4928 - RNA, 20 nt, Artificial Sequence
  Synthetic
gaguagagcggaggcaggag

SEQ ID NO: 4929 - RNA, 21 nt, Artificial Sequence
  Synthetic
ugaguagagcggaggcaggag

SEQ ID NO: 4930 - RNA, 22 nt, Artificial Sequence
  Synthetic
gugaguagagcggaggcaggag

SEQ ID NO: 4931 - RNA, 23 nt, Artificial Sequence
  Synthetic
agugaguagagcggaggcaggag

SEQ ID NO: 4932 - RNA, 24 nt, Artificial Sequence
  Synthetic
cagugaguagagcggaggcaggag

SEQ ID NO: 4933 - RNA, 18 nt, Artificial Sequence
  Synthetic
aagaugaacaccagugag

SEQ ID NO: 4934 - RNA, 19 nt, Artificial Sequence
  Synthetic
aaagaugaacaccagugag

SEQ ID NO: 4935 - RNA, 20 nt, Artificial Sequence
  Synthetic
caaagaugaacaccagugag

SEQ ID NO: 4936 - RNA, 21 nt, Artificial Sequence
  Synthetic
ccaaagaugaacaccagugag

SEQ ID NO: 4937 - RNA, 22 nt, Artificial Sequence
  Synthetic
accaaagaugaacaccagugag

SEQ ID NO: 4938 - RNA, 23 nt, Artificial Sequence
  Synthetic
aaccaaagaugaacaccagugag

SEQ ID NO: 4939 - RNA, 24 nt, Artificial Sequence
  Synthetic
aaaccaaagaugaacaccagugag

SEQ ID NO: 4940 - RNA, 18 nt, Artificial Sequence
  Synthetic
aggucagagauggccagg

SEQ ID NO: 4941 - RNA, 19 nt, Artificial Sequence
  Synthetic
caggucagagauggccagg

SEQ ID NO: 4942 - RNA, 20 nt, Artificial Sequence
  Synthetic
acaggucagagauggccagg

SEQ ID NO: 4943 - RNA, 21 nt, Artificial Sequence
  Synthetic
aacaggucagagauggccagg

SEQ ID NO: 4944 - RNA, 22 nt, Artificial Sequence
  Synthetic
aaacaggucagagauggccagg

SEQ ID NO: 4945 - RNA, 23 nt, Artificial Sequence
  Synthetic
aaaacaggucagagauggccagg

SEQ ID NO: 4946 - RNA, 24 nt, Artificial Sequence
  Synthetic
aaaaacaggucagagauggccagg

SEQ ID NO: 4947 - RNA, 18 nt, Artificial Sequence
  Synthetic
cuuuugcaguuuaucagg

SEQ ID NO: 4948 - RNA, 19 nt, Artificial Sequence
  Synthetic
ccuuuugcaguuuaucagg

SEQ ID NO: 4949 - RNA, 20 nt, Artificial Sequence
  Synthetic
gccuuuugcaguuuaucagg

SEQ ID NO: 4950 - RNA, 21 nt, Artificial Sequence
  Synthetic
agccuuuugcaguuuaucagg

SEQ ID NO: 4951 - RNA, 22 nt, Artificial Sequence
  Synthetic
cagccuuuugcaguuuaucagg

SEQ ID NO: 4952 - RNA, 23 nt, Artificial Sequence
  Synthetic
ucagccuuuugcaguuuaucagg

SEQ ID NO: 4953 - RNA, 24 nt, Artificial Sequence
  Synthetic
uucagccuuuugcaguuuaucagg

SEQ ID NO: 4954 - RNA, 18 nt, Artificial Sequence
  Synthetic
cagugaguagagcggagg

SEQ ID NO: 4955 - RNA, 19 nt, Artificial Sequence
  Synthetic
ccagugaguagagcggagg

SEQ ID NO: 4956 - RNA, 20 nt, Artificial Sequence
  Synthetic
accagugaguagagcggagg

SEQ ID NO: 4957 - RNA, 21 nt, Artificial Sequence
  Synthetic
caccagugaguagagcggagg

SEQ ID NO: 4958 - RNA, 22 nt, Artificial Sequence
  Synthetic
acaccagugaguagagcggagg

SEQ ID NO: 4959 - RNA, 23 nt, Artificial Sequence
  Synthetic
aacaccagugaguagagcggagg

SEQ ID NO: 4960 - RNA, 24 nt, Artificial Sequence
  Synthetic
gaacaccagugaguagagcggagg

SEQ ID NO: 4961 - RNA, 18 nt, Artificial Sequence
  Synthetic
gguaaagaugauuccugg

SEQ ID NO: 4962 - RNA, 19 nt, Artificial Sequence
  Synthetic
ugguaaagaugauuccugg

SEQ ID NO: 4963 - RNA, 20 nt, Artificial Sequence
  Synthetic
cugguaaagaugauuccugg

SEQ ID NO: 4964 - RNA, 21 nt, Artificial Sequence
  Synthetic
ucugguaaagaugauuccugg

SEQ ID NO: 4965 - RNA, 22 nt, Artificial Sequence
  Synthetic
aucugguaaagaugauuccugg

SEQ ID NO: 4966 - RNA, 23 nt, Artificial Sequence
  Synthetic
gaucugguaaagaugauuccugg

SEQ ID NO: 4967 - RNA, 24 nt, Artificial Sequence
  Synthetic
agaucugguaaagaugauuccugg

SEQ ID NO: 4968 - RNA, 18 nt, Artificial Sequence
  Synthetic
uucacauugauuuuuugg

SEQ ID NO: 4969 - RNA, 19 nt, Artificial Sequence
  Synthetic
cuucacauugauuuuuugg

SEQ ID NO: 4970 - RNA, 20 nt, Artificial Sequence
  Synthetic
gcuucacauugauuuuuugg

SEQ ID NO: 4971 - RNA, 21 nt, Artificial Sequence
  Synthetic
ugcuucacauugauuuuuugg

SEQ ID NO: 4972 - RNA, 22 nt, Artificial Sequence
  Synthetic
uugcuucacauugauuuuuugg

SEQ ID NO: 4973 - RNA, 23 nt, Artificial Sequence
  Synthetic
uuugcuucacauugauuuuuugg

SEQ ID NO: 4974 - RNA, 24 nt, Artificial Sequence
  Synthetic
auuugcuucacauugauuuuuugg

SEQ ID NO: 4975 - RNA, 18 nt, Artificial Sequence
  Synthetic
ucgauugucaggaggaug

SEQ ID NO: 4976 - RNA, 19 nt, Artificial Sequence
  Synthetic
aucgauugucaggaggaug

SEQ ID NO: 4977 - RNA, 20 nt, Artificial Sequence
  Synthetic
uaucgauugucaggaggaug

SEQ ID NO: 4978 - RNA, 21 nt, Artificial Sequence
  Synthetic
cuaucgauugucaggaggaug

SEQ ID NO: 4979 - RNA, 22 nt, Artificial Sequence
  Synthetic
ccuaucgauugucaggaggaug

SEQ ID NO: 4980 - RNA, 23 nt, Artificial Sequence
  Synthetic
accuaucgauugucaggaggaug

SEQ ID NO: 4981 - RNA, 24 nt, Artificial Sequence
  Synthetic
uaccuaucgauugucaggaggaug

SEQ ID NO: 4982 - RNA, 18 nt, Artificial Sequence
  Synthetic
auugucaggaggaugaug

SEQ ID NO: 4983 - RNA, 19 nt, Artificial Sequence
  Synthetic
gauugucaggaggaugaug

SEQ ID NO: 4984 - RNA, 20 nt, Artificial Sequence
  Synthetic
cgauugucaggaggaugaug

SEQ ID NO: 4985 - RNA, 21 nt, Artificial Sequence
  Synthetic
ucgauugucaggaggaugaug

SEQ ID NO: 4986 - RNA, 22 nt, Artificial Sequence
  Synthetic
aucgauugucaggaggaugaug

SEQ ID NO: 4987 - RNA, 23 nt, Artificial Sequence
  Synthetic
uaucgauugucaggaggaugaug

SEQ ID NO: 4988 - RNA, 24 nt, Artificial Sequence
  Synthetic
cuaucgauugucaggaggaugaug

SEQ ID NO: 4989 - RNA, 18 nt, Artificial Sequence
  Synthetic
cugguaaagaugauuccu

SEQ ID NO: 4990 - RNA, 19 nt, Artificial Sequence
  Synthetic
ucugguaaagaugauuccu

SEQ ID NO: 4991 - RNA, 20 nt, Artificial Sequence
  Synthetic
aucugguaaagaugauuccu

SEQ ID NO: 4992 - RNA, 21 nt, Artificial Sequence
  Synthetic
gaucugguaaagaugauuccu

SEQ ID NO: 4993 - RNA, 22 nt, Artificial Sequence
  Synthetic
agaucugguaaagaugauuccu

SEQ ID NO: 4994 - RNA, 23 nt, Artificial Sequence
  Synthetic
gagaucugguaaagaugauuccu

SEQ ID NO: 4995 - RNA, 24 nt, Artificial Sequence
  Synthetic
ugagaucugguaaagaugauuccu

SEQ ID NO: 4996 - RNA, 18 nt, Artificial Sequence
  Synthetic
agcccagaaggggacagu

SEQ ID NO: 4997 - RNA, 19 nt, Artificial Sequence
  Synthetic
gagcccagaaggggacagu

SEQ ID NO: 4998 - RNA, 20 nt, Artificial Sequence
  Synthetic
ugagcccagaaggggacagu

SEQ ID NO: 4999 - RNA, 21 nt, Artificial Sequence
  Synthetic
gugagcccagaaggggacagu

SEQ ID NO: 5000 - RNA, 22 nt, Artificial Sequence
  Synthetic
agugagcccagaaggggacagu

SEQ ID NO: 5001 - RNA, 23 nt, Artificial Sequence
  Synthetic
uagugagcccagaaggggacagu

SEQ ID NO: 5002 - RNA, 24 nt, Artificial Sequence
  Synthetic
auagugagcccagaaggggacagu

SEQ ID NO: 5003 - RNA, 18 nt, Artificial Sequence
  Synthetic
uaagaaggaaaaacaggu

SEQ ID NO: 5004 - RNA, 19 nt, Artificial Sequence
  Synthetic
guaagaaggaaaaacaggu

SEQ ID NO: 5005 - RNA, 20 nt, Artificial Sequence
  Synthetic
aguaagaaggaaaaacaggu

SEQ ID NO: 5006 - RNA, 21 nt, Artificial Sequence
  Synthetic
caguaagaaggaaaaacaggu

SEQ ID NO: 5007 - RNA, 22 nt, Artificial Sequence
  Synthetic
acaguaagaaggaaaaacaggu

SEQ ID NO: 5008 - RNA, 23 nt, Artificial Sequence
  Synthetic
gacaguaagaaggaaaaacaggu

SEQ ID NO: 5009 - RNA, 24 nt, Artificial Sequence
  Synthetic
ggacaguaagaaggaaaaacaggu

SEQ ID NO: 5010 - RNA, 18 nt, Artificial Sequence
  Synthetic
cagguaccuaucgauugu

SEQ ID NO: 5011 - RNA, 19 nt, Artificial Sequence
  Synthetic
ccagguaccuaucgauugu

SEQ ID NO: 5012 - RNA, 20 nt, Artificial Sequence
  Synthetic
gccagguaccuaucgauugu

SEQ ID NO: 5013 - RNA, 21 nt, Artificial Sequence
  Synthetic
agccagguaccuaucgauugu

SEQ ID NO: 5014 - RNA, 22 nt, Artificial Sequence
  Synthetic
cagccagguaccuaucgauugu

SEQ ID NO: 5015 - RNA, 23 nt, Artificial Sequence
  Synthetic
acagccagguaccuaucgauugu

SEQ ID NO: 5016 - RNA, 24 nt, Artificial Sequence
  Synthetic
gacagccagguaccuaucgauugu

SEQ ID NO: 5017 - RNA, 18 nt, Artificial Sequence
  Synthetic
guaaugaagaccuucuuu

SEQ ID NO: 5018 - RNA, 19 nt, Artificial Sequence
  Synthetic
uguaaugaagaccuucuuu

SEQ ID NO: 5019 - RNA, 20 nt, Artificial Sequence
  Synthetic
guguaaugaagaccuucuuu

SEQ ID NO: 5020 - RNA, 18 nt, Artificial Sequence
  Synthetic
ucuuuaccagaucucaaa

SEQ ID NO: 5021 - RNA, 19 nt, Artificial Sequence
  Synthetic
aucuuuaccagaucucaaa

SEQ ID NO: 5022 - RNA, 20 nt, Artificial Sequence
  Synthetic
caucuuuaccagaucucaaa

SEQ ID NO: 5023 - RNA, 21 nt, Artificial Sequence
  Synthetic
ucaucuuuaccagaucucaaa

SEQ ID NO: 5024 - RNA, 22 nt, Artificial Sequence
  Synthetic
aucaucuuuaccagaucucaaa

SEQ ID NO: 5025 - RNA, 23 nt, Artificial Sequence
  Synthetic
aaucaucuuuaccagaucucaaa

SEQ ID NO: 5026 - RNA, 24 nt, Artificial Sequence
  Synthetic
gaaucaucuuuaccagaucucaaa

SEQ ID NO: 5027 - RNA, 18 nt, Artificial Sequence
  Synthetic
gacaucaauuauuauaca

SEQ ID NO: 5028 - RNA, 19 nt, Artificial Sequence
  Synthetic
ugacaucaauuauuauaca

SEQ ID NO: 5029 - RNA, 20 nt, Artificial Sequence
  Synthetic
augacaucaauuauuauaca

SEQ ID NO: 5030 - RNA, 21 nt, Artificial Sequence
  Synthetic
uaugacaucaauuauuauaca

SEQ ID NO: 5031 - RNA, 22 nt, Artificial Sequence
  Synthetic
cuaugacaucaauuauuauaca

SEQ ID NO: 5032 - RNA, 23 nt, Artificial Sequence
  Synthetic
ucuaugacaucaauuauuauaca

SEQ ID NO: 5033 - RNA, 24 nt, Artificial Sequence
  Synthetic
aucuaugacaucaauuauuauaca

SEQ ID NO: 5034 - RNA, 18 nt, Artificial Sequence
  Synthetic
ucacuaugcugccgccca

SEQ ID NO: 5035 - RNA, 19 nt, Artificial Sequence
  Synthetic
cucacuaugcugccgccca

SEQ ID NO: 5036 - RNA, 20 nt, Artificial Sequence
  Synthetic
gcucacuaugcugccgccca

SEQ ID NO: 5037 - RNA, 21 nt, Artificial Sequence
  Synthetic
ggcucacuaugcugccgccca

SEQ ID NO: 5038 - RNA, 22 nt, Artificial Sequence
  Synthetic
gggcucacuaugcugccgccca

SEQ ID NO: 5039 - RNA, 23 nt, Artificial Sequence
  Synthetic
ugggcucacuaugcugccgccca

SEQ ID NO: 5040 - RNA, 24 nt, Artificial Sequence
  Synthetic
cugggcucacuaugcugccgccca

SEQ ID NO: 5041 - RNA, 18 nt, Artificial Sequence
  Synthetic
caaugugucaacucuuga

SEQ ID NO: 5042 - RNA, 19 nt, Artificial Sequence
  Synthetic
acaaugugucaacucuuga

SEQ ID NO: 5043 - RNA, 20 nt, Artificial Sequence
  Synthetic
uacaaugugucaacucuuga

SEQ ID NO: 5044 - RNA, 21 nt, Artificial Sequence
  Synthetic
auacaaugugucaacucuuga

SEQ ID NO: 5045 - RNA, 22 nt, Artificial Sequence
  Synthetic
aauacaaugugucaacucuuga

SEQ ID NO: 5046 - RNA, 23 nt, Artificial Sequence
  Synthetic
aaauacaaugugucaacucuuga

SEQ ID NO: 5047 - RNA, 24 nt, Artificial Sequence
  Synthetic
gaaauacaaugugucaacucuuga

SEQ ID NO: 5048 - RNA, 18 nt, Artificial Sequence
  Synthetic
cuguguuugcgucucucc

SEQ ID NO: 5049 - RNA, 19 nt, Artificial Sequence
  Synthetic
gcuguguuugcgucucucc

SEQ ID NO: 5050 - RNA, 20 nt, Artificial Sequence
  Synthetic
ggcuguguuugcgucucucc

SEQ ID NO: 5051 - RNA, 21 nt, Artificial Sequence
  Synthetic
uggcuguguuugcgucucucc

SEQ ID NO: 5052 - RNA, 22 nt, Artificial Sequence
  Synthetic
guggcuguguuugcgucucucc

SEQ ID NO: 5053 - RNA, 23 nt, Artificial Sequence
  Synthetic
gguggcuguguuugcgucucucc

SEQ ID NO: 5054 - RNA, 24 nt, Artificial Sequence
  Synthetic
ugguggcuguguuugcgucucucc

SEQ ID NO: 5055 - RNA, 18 nt, Artificial Sequence
  Synthetic
uguguuugcuuuaaaagc

SEQ ID NO: 5056 - RNA, 19 nt, Artificial Sequence
  Synthetic
cuguguuugcuuuaaaagc

SEQ ID NO: 5057 - RNA, 20 nt, Artificial Sequence
  Synthetic
gcuguguuugcuuuaaaagc

SEQ ID NO: 5058 - RNA, 21 nt, Artificial Sequence
  Synthetic
ugcuguguuugcuuuaaaagc

SEQ ID NO: 5059 - RNA, 22 nt, Artificial Sequence
  Synthetic
augcuguguuugcuuuaaaagc

SEQ ID NO: 5060 - RNA, 23 nt, Artificial Sequence
  Synthetic
caugcuguguuugcuuuaaaagc

SEQ ID NO: 5061 - RNA, 24 nt, Artificial Sequence
  Synthetic
ccaugcuguguuugcuuuaaaagc

SEQ ID NO: 5062 - RNA, 18 nt, Artificial Sequence
  Synthetic
cacuaugcugccgcccag

SEQ ID NO: 5063 - RNA, 19 nt, Artificial Sequence
  Synthetic
ucacuaugcugccgcccag

SEQ ID NO: 5064 - RNA, 20 nt, Artificial Sequence
  Synthetic
cucacuaugcugccgcccag

SEQ ID NO: 5065 - RNA, 21 nt, Artificial Sequence
  Synthetic
gcucacuaugcugccgcccag

SEQ ID NO: 5066 - RNA, 22 nt, Artificial Sequence
  Synthetic
ggcucacuaugcugccgcccag

SEQ ID NO: 5067 - RNA, 23 nt, Artificial Sequence
  Synthetic
gggcucacuaugcugccgcccag

SEQ ID NO: 5068 - RNA, 24 nt, Artificial Sequence
  Synthetic
ugggcucacuaugcugccgcccag

SEQ ID NO: 5069 - RNA, 18 nt, Artificial Sequence
  Synthetic
cugauaaacugcaaaagg

SEQ ID NO: 5070 - RNA, 19 nt, Artificial Sequence
  Synthetic
ccugauaaacugcaaaagg

SEQ ID NO: 5071 - RNA, 20 nt, Artificial Sequence
  Synthetic
uccugauaaacugcaaaagg

SEQ ID NO: 5072 - RNA, 21 nt, Artificial Sequence
  Synthetic
auccugauaaacugcaaaagg

SEQ ID NO: 5073 - RNA, 22 nt, Artificial Sequence
  Synthetic
cauccugauaaacugcaaaagg

SEQ ID NO: 5074 - RNA, 23 nt, Artificial Sequence
  Synthetic
ucauccugauaaacugcaaaagg

SEQ ID NO: 5075 - RNA, 24 nt, Artificial Sequence
  Synthetic
cucauccugauaaacugcaaaagg

SEQ ID NO: 5076 - RNA, 18 nt, Artificial Sequence
  Synthetic
uuuuuauuuaugcacagg

SEQ ID NO: 5077 - RNA, 19 nt, Artificial Sequence
  Synthetic
cuuuuuauuuaugcacagg

SEQ ID NO: 5078 - RNA, 20 nt, Artificial Sequence
  Synthetic
acuuuuuauuuaugcacagg

SEQ ID NO: 5079 - RNA, 18 nt, Artificial Sequence
  Synthetic
uuuuauuuaugcacaggg

SEQ ID NO: 5080 - RNA, 19 nt, Artificial Sequence
  Synthetic
uuuuuauuuaugcacaggg

SEQ ID NO: 5081 - RNA, 20 nt, Artificial Sequence
  Synthetic
cuuuuuauuuaugcacaggg

SEQ ID NO: 5082 - RNA, 18 nt, Artificial Sequence
  Synthetic
auaaacugcaaaaggcug

SEQ ID NO: 5083 - RNA, 19 nt, Artificial Sequence
  Synthetic
gauaaacugcaaaaggcug

SEQ ID NO: 5084 - RNA, 20 nt, Artificial Sequence
  Synthetic
ugauaaacugcaaaaggcug

SEQ ID NO: 5085 - RNA, 21 nt, Artificial Sequence
  Synthetic
cugauaaacugcaaaaggcug

SEQ ID NO: 5086 - RNA, 22 nt, Artificial Sequence
  Synthetic
ccugauaaacugcaaaaggcug

SEQ ID NO: 5087 - RNA, 23 nt, Artificial Sequence
  Synthetic
uccugauaaacugcaaaaggcug

SEQ ID NO: 5088 - RNA, 24 nt, Artificial Sequence
  Synthetic
auccugauaaacugcaaaaggcug

SEQ ID NO: 5089 - RNA, 18 nt, Artificial Sequence
  Synthetic
cccugccaaaaaaucaau

SEQ ID NO: 5090 - RNA, 19 nt, Artificial Sequence
  Synthetic
gcccugccaaaaaaucaau

SEQ ID NO: 5091 - RNA, 20 nt, Artificial Sequence
  Synthetic
agcccugccaaaaaaucaau

SEQ ID NO: 5092 - RNA, 21 nt, Artificial Sequence
  Synthetic
gagcccugccaaaaaaucaau

SEQ ID NO: 5093 - RNA, 22 nt, Artificial Sequence
  Synthetic
ggagcccugccaaaaaaucaau

SEQ ID NO: 5094 - RNA, 23 nt, Artificial Sequence
  Synthetic
cggagcccugccaaaaaaucaau

SEQ ID NO: 5095 - RNA, 24 nt, Artificial Sequence
  Synthetic
ucggagcccugccaaaaaaucaau

SEQ ID NO: 5096 - RNA, 18 nt, Artificial Sequence
  Synthetic
acaucaauuauuauacau

SEQ ID NO: 5097 - RNA, 19 nt, Artificial Sequence
  Synthetic
gacaucaauuauuauacau

SEQ ID NO: 5098 - RNA, 20 nt, Artificial Sequence
  Synthetic
ugacaucaauuauuauacau

SEQ ID NO: 5099 - RNA, 21 nt, Artificial Sequence
  Synthetic
augacaucaauuauuauacau

SEQ ID NO: 5100 - RNA, 22 nt, Artificial Sequence
  Synthetic
uaugacaucaauuauuauacau

SEQ ID NO: 5101 - RNA, 23 nt, Artificial Sequence
  Synthetic
cuaugacaucaauuauuauacau

SEQ ID NO: 5102 - RNA, 24 nt, Artificial Sequence
  Synthetic
ucuaugacaucaauuauuauacau

SEQ ID NO: 5103 - RNA, 18 nt, Artificial Sequence
  Synthetic
cugccgcccagugggacu

SEQ ID NO: 5104 - RNA, 19 nt, Artificial Sequence
  Synthetic
gcugccgcccagugggacu

SEQ ID NO: 5105 - RNA, 20 nt, Artificial Sequence
  Synthetic
ugcugccgcccagugggacu

SEQ ID NO: 5106 - RNA, 21 nt, Artificial Sequence
  Synthetic
augcugccgcccagugggacu

SEQ ID NO: 5107 - RNA, 22 nt, Artificial Sequence
  Synthetic
uaugcugccgcccagugggacu

SEQ ID NO: 5108 - RNA, 23 nt, Artificial Sequence
  Synthetic
cuaugcugccgcccagugggacu

SEQ ID NO: 5109 - RNA, 24 nt, Artificial Sequence
  Synthetic
acuaugcugccgcccagugggacu

SEQ ID NO: 5110 - RNA, 18 nt, Artificial Sequence
  Synthetic
aagccaggacggucaccu

SEQ ID NO: 5111 - RNA, 19 nt, Artificial Sequence
  Synthetic
aaagccaggacggucaccu

SEQ ID NO: 5112 - RNA, 20 nt, Artificial Sequence
  Synthetic
aaaagccaggacggucaccu

SEQ ID NO: 5113 - RNA, 21 nt, Artificial Sequence
  Synthetic
uaaaagccaggacggucaccu

SEQ ID NO: 5114 - RNA, 22 nt, Artificial Sequence
  Synthetic
uuaaaagccaggacggucaccu

SEQ ID NO: 5115 - RNA, 23 nt, Artificial Sequence
  Synthetic
uuuaaaagccaggacggucaccu

SEQ ID NO: 5116 - RNA, 24 nt, Artificial Sequence
  Synthetic
cuuuaaaagccaggacggucaccu

SEQ ID NO: 5117 - RNA, 18 nt, Artificial Sequence
  Synthetic
auuuuauaggcuucuucu

SEQ ID NO: 5118 - RNA, 19 nt, Artificial Sequence
  Synthetic
uauuuuauaggcuucuucu

SEQ ID NO: 5119 - RNA, 20 nt, Artificial Sequence
  Synthetic
cuauuuuauaggcuucuucu

SEQ ID NO: 5120 - RNA, 21 nt, Artificial Sequence
  Synthetic
ucuauuuuauaggcuucuucu

SEQ ID NO: 5121 - RNA, 22 nt, Artificial Sequence
  Synthetic
cucuauuuuauaggcuucuucu

SEQ ID NO: 5122 - RNA, 23 nt, Artificial Sequence
  Synthetic
gcucuauuuuauaggcuucuucu

SEQ ID NO: 5123 - RNA, 24 nt, Artificial Sequence
  Synthetic
ggcucuauuuuauaggcuucuucu

SEQ ID NO: 5124 - RNA, 18 nt, Artificial Sequence
  Synthetic
ugccgcccagugggacuu

SEQ ID NO: 5125 - RNA, 19 nt, Artificial Sequence
  Synthetic
cugccgcccagugggacuu

SEQ ID NO: 5126 - RNA, 20 nt, Artificial Sequence
  Synthetic
gcugccgcccagugggacuu

SEQ ID NO: 5127 - RNA, 21 nt, Artificial Sequence
  Synthetic
ugcugccgcccagugggacuu

SEQ ID NO: 5128 - RNA, 22 nt, Artificial Sequence
  Synthetic
augcugccgcccagugggacuu

SEQ ID NO: 5129 - RNA, 23 nt, Artificial Sequence
  Synthetic
uaugcugccgcccagugggacuu

SEQ ID NO: 5130 - RNA, 24 nt, Artificial Sequence
  Synthetic
cuaugcugccgcccagugggacuu

SEQ ID NO: 5131 - RNA, 18 nt, Artificial Sequence
  Synthetic
ccuucuuacuguccccuu

SEQ ID NO: 5132 - RNA, 19 nt, Artificial Sequence
  Synthetic
uccuucuuacuguccccuu

SEQ ID NO: 5133 - RNA, 20 nt, Artificial Sequence
  Synthetic
uuccuucuuacuguccccuu

SEQ ID NO: 5134 - RNA, 21 nt, Artificial Sequence
  Synthetic
uuuccuucuuacuguccccuu

SEQ ID NO: 5135 - RNA, 22 nt, Artificial Sequence
  Synthetic
uuuuccuucuuacuguccccuu

SEQ ID NO: 5136 - RNA, 23 nt, Artificial Sequence
  Synthetic
uuuuuccuucuuacuguccccuu

SEQ ID NO: 5137 - RNA, 24 nt, Artificial Sequence
  Synthetic
guuuuuccuucuuacuguccccuu

SEQ ID NO: 5138 - RNA, 18 nt, Artificial Sequence
  Synthetic
guguucaucuuugguuuu

SEQ ID NO: 5139 - RNA, 19 nt, Artificial Sequence
  Synthetic
gguguucaucuuugguuuu

SEQ ID NO: 5140 - RNA, 20 nt, Artificial Sequence
  Synthetic
ugguguucaucuuugguuuu

SEQ ID NO: 5141 - RNA, 21 nt, Artificial Sequence
  Synthetic
cugguguucaucuuugguuuu

SEQ ID NO: 5142 - RNA, 22 nt, Artificial Sequence
  Synthetic
acugguguucaucuuugguuuu

SEQ ID NO: 5143 - RNA, 23 nt, Artificial Sequence
  Synthetic
cacugguguucaucuuugguuuu

SEQ ID NO: 5144 - RNA, 24 nt, Artificial Sequence
  Synthetic
ucacugguguucaucuuugguuuu

SEQ ID NO: 5145 - RNA, 18 nt, Artificial Sequence
  Synthetic
gagccucuugcuggaaaa

SEQ ID NO: 5146 - RNA, 19 nt, Artificial Sequence
  Synthetic
ggagccucuugcuggaaaa

SEQ ID NO: 5147 - RNA, 20 nt, Artificial Sequence
  Synthetic
gggagccucuugcuggaaaa

SEQ ID NO: 5148 - RNA, 21 nt, Artificial Sequence
  Synthetic
cgggagccucuugcuggaaaa

SEQ ID NO: 5149 - RNA, 22 nt, Artificial Sequence
  Synthetic
ucgggagccucuugcuggaaaa

SEQ ID NO: 5150 - RNA, 23 nt, Artificial Sequence
  Synthetic
cucgggagccucuugcuggaaaa

SEQ ID NO: 5151 - RNA, 24 nt, Artificial Sequence
  Synthetic
gcucgggagccucuugcuggaaaa

SEQ ID NO: 5152 - RNA, 18 nt, Artificial Sequence
  Synthetic
auacugacuguauggaaa

SEQ ID NO: 5153 - RNA, 19 nt, Artificial Sequence
  Synthetic
gauacugacuguauggaaa

SEQ ID NO: 5154 - RNA, 20 nt, Artificial Sequence
  Synthetic
ugauacugacuguauggaaa

SEQ ID NO: 5155 - RNA, 21 nt, Artificial Sequence
  Synthetic
uugauacugacuguauggaaa

SEQ ID NO: 5156 - RNA, 22 nt, Artificial Sequence
  Synthetic
auugauacugacuguauggaaa

SEQ ID NO: 5157 - RNA, 23 nt, Artificial Sequence
  Synthetic
aauugauacugacuguauggaaa

SEQ ID NO: 5158 - RNA, 24 nt, Artificial Sequence
  Synthetic
gaauugauacugacuguauggaaa

SEQ ID NO: 5159 - RNA, 18 nt, Artificial Sequence
  Synthetic
caguggaucggguguaaa

SEQ ID NO: 5160 - RNA, 19 nt, Artificial Sequence
  Synthetic
ccaguggaucggguguaaa

SEQ ID NO: 5161 - RNA, 20 nt, Artificial Sequence
  Synthetic
cccaguggaucggguguaaa

SEQ ID NO: 5162 - RNA, 21 nt, Artificial Sequence
  Synthetic
ccccaguggaucggguguaaa

SEQ ID NO: 5163 - RNA, 22 nt, Artificial Sequence
  Synthetic
uccccaguggaucggguguaaa

SEQ ID NO: 5164 - RNA, 23 nt, Artificial Sequence
  Synthetic
cuccccaguggaucggguguaaa

SEQ ID NO: 5165 - RNA, 24 nt, Artificial Sequence
  Synthetic
gcuccccaguggaucggguguaaa

SEQ ID NO: 5166 - RNA, 18 nt, Artificial Sequence
  Synthetic
guuguagggagcccagaa

SEQ ID NO: 5167 - RNA, 19 nt, Artificial Sequence
  Synthetic
uguuguagggagcccagaa

SEQ ID NO: 5168 - RNA, 20 nt, Artificial Sequence
  Synthetic
auguuguagggagcccagaa

SEQ ID NO: 5169 - RNA, 21 nt, Artificial Sequence
  Synthetic
aauguuguagggagcccagaa

SEQ ID NO: 5170 - RNA, 22 nt, Artificial Sequence
  Synthetic
caauguuguagggagcccagaa

SEQ ID NO: 5171 - RNA, 23 nt, Artificial Sequence
  Synthetic
acaauguuguagggagcccagaa

SEQ ID NO: 5172 - RNA, 24 nt, Artificial Sequence
  Synthetic
gacaauguuguagggagcccagaa

SEQ ID NO: 5173 - RNA, 18 nt, Artificial Sequence
  Synthetic
cuucuucucauuucgaca

SEQ ID NO: 5174 - RNA, 19 nt, Artificial Sequence
  Synthetic
ucuucuucucauuucgaca

SEQ ID NO: 5175 - RNA, 20 nt, Artificial Sequence
  Synthetic
cucuucuucucauuucgaca

SEQ ID NO: 5176 - RNA, 21 nt, Artificial Sequence
  Synthetic
ccucuucuucucauuucgaca

SEQ ID NO: 5177 - RNA, 22 nt, Artificial Sequence
  Synthetic
gccucuucuucucauuucgaca

SEQ ID NO: 5178 - RNA, 23 nt, Artificial Sequence
  Synthetic
ugccucuucuucucauuucgaca

SEQ ID NO: 5179 - RNA, 24 nt, Artificial Sequence
  Synthetic
gugccucuucuucucauuucgaca

SEQ ID NO: 5180 - RNA, 18 nt, Artificial Sequence
  Synthetic
gaauugauacugacugua

SEQ ID NO: 5181 - RNA, 19 nt, Artificial Sequence
  Synthetic
agaauugauacugacugua

SEQ ID NO: 5182 - RNA, 20 nt, Artificial Sequence
  Synthetic
cagaauugauacugacugua

SEQ ID NO: 5183 - RNA, 21 nt, Artificial Sequence
  Synthetic
ccagaauugauacugacugua

SEQ ID NO: 5184 - RNA, 22 nt, Artificial Sequence
  Synthetic
uccagaauugauacugacugua

SEQ ID NO: 5185 - RNA, 23 nt, Artificial Sequence
  Synthetic
uuccagaauugauacugacugua

SEQ ID NO: 5186 - RNA, 24 nt, Artificial Sequence
  Synthetic
cuuccagaauugauacugacugua

SEQ ID NO: 5187 - RNA, 18 nt, Artificial Sequence
  Synthetic
augagagcugcaggugua

SEQ ID NO: 5188 - RNA, 19 nt, Artificial Sequence
  Synthetic
aaugagagcugcaggugua

SEQ ID NO: 5189 - RNA, 20 nt, Artificial Sequence
  Synthetic
aaaugagagcugcaggugua

SEQ ID NO: 5190 - RNA, 21 nt, Artificial Sequence
  Synthetic
aaaaugagagcugcaggugua

SEQ ID NO: 5191 - RNA, 22 nt, Artificial Sequence
  Synthetic
gaaaaugagagcugcaggugua

SEQ ID NO: 5192 - RNA, 23 nt, Artificial Sequence
  Synthetic
ggaaaaugagagcugcaggugua

SEQ ID NO: 5193 - RNA, 24 nt, Artificial Sequence
  Synthetic
uggaaaaugagagcugcaggugua

SEQ ID NO: 5194 - RNA, 18 nt, Artificial Sequence
  Synthetic
gagaaggacaauguugua

SEQ ID NO: 5195 - RNA, 19 nt, Artificial Sequence
  Synthetic
ggagaaggacaauguugua

SEQ ID NO: 5196 - RNA, 20 nt, Artificial Sequence
  Synthetic
aggagaaggacaauguugua

SEQ ID NO: 5197 - RNA, 21 nt, Artificial Sequence
  Synthetic
caggagaaggacaauguugua

SEQ ID NO: 5198 - RNA, 22 nt, Artificial Sequence
  Synthetic
ucaggagaaggacaauguugua

SEQ ID NO: 5199 - RNA, 23 nt, Artificial Sequence
  Synthetic
uucaggagaaggacaauguugua

SEQ ID NO: 5200 - RNA, 24 nt, Artificial Sequence
  Synthetic
guucaggagaaggacaauguugua

SEQ ID NO: 5201 - RNA, 18 nt, Artificial Sequence
  Synthetic
acaauguuguagggagcc

SEQ ID NO: 5202 - RNA, 19 nt, Artificial Sequence
  Synthetic
gacaauguuguagggagcc

SEQ ID NO: 5203 - RNA, 20 nt, Artificial Sequence
  Synthetic
ggacaauguuguagggagcc

SEQ ID NO: 5204 - RNA, 21 nt, Artificial Sequence
  Synthetic
aggacaauguuguagggagcc

SEQ ID NO: 5205 - RNA, 22 nt, Artificial Sequence
  Synthetic
aaggacaauguuguagggagcc

SEQ ID NO: 5206 - RNA, 23 nt, Artificial Sequence
  Synthetic
gaaggacaauguuguagggagcc

SEQ ID NO: 5207 - RNA, 24 nt, Artificial Sequence
  Synthetic
agaaggacaauguuguagggagcc

SEQ ID NO: 5208 - RNA, 18 nt, Artificial Sequence
  Synthetic
uucaggccaaagaauucc

SEQ ID NO: 5209 - RNA, 19 nt, Artificial Sequence
  Synthetic
auucaggccaaagaauucc

SEQ ID NO: 5210 - RNA, 20 nt, Artificial Sequence
  Synthetic
uauucaggccaaagaauucc

SEQ ID NO: 5211 - RNA, 21 nt, Artificial Sequence
  Synthetic
uuauucaggccaaagaauucc

SEQ ID NO: 5212 - RNA, 22 nt, Artificial Sequence
  Synthetic
auuauucaggccaaagaauucc

SEQ ID NO: 5213 - RNA, 23 nt, Artificial Sequence
  Synthetic
aauuauucaggccaaagaauucc

SEQ ID NO: 5214 - RNA, 24 nt, Artificial Sequence
  Synthetic
caauuauucaggccaaagaauucc

SEQ ID NO: 5215 - RNA, 18 nt, Artificial Sequence
  Synthetic
ucugguaaagaugauucc

SEQ ID NO: 5216 - RNA, 19 nt, Artificial Sequence
  Synthetic
aucugguaaagaugauucc

SEQ ID NO: 5217 - RNA, 20 nt, Artificial Sequence
  Synthetic
gaucugguaaagaugauucc

SEQ ID NO: 5218 - RNA, 21 nt, Artificial Sequence
  Synthetic
agaucugguaaagaugauucc

SEQ ID NO: 5219 - RNA, 22 nt, Artificial Sequence
  Synthetic
gagaucugguaaagaugauucc

SEQ ID NO: 5220 - RNA, 23 nt, Artificial Sequence
  Synthetic
ugagaucugguaaagaugauucc

SEQ ID NO: 5221 - RNA, 24 nt, Artificial Sequence
  Synthetic
uugagaucugguaaagaugauucc

SEQ ID NO: 5222 - RNA, 18 nt, Artificial Sequence
  Synthetic
uaaacugagcuugcucgc

SEQ ID NO: 5223 - RNA, 19 nt, Artificial Sequence
  Synthetic
guaaacugagcuugcucgc

SEQ ID NO: 5224 - RNA, 20 nt, Artificial Sequence
  Synthetic
uguaaacugagcuugcucgc

SEQ ID NO: 5225 - RNA, 21 nt, Artificial Sequence
  Synthetic
guguaaacugagcuugcucgc

SEQ ID NO: 5226 - RNA, 22 nt, Artificial Sequence
  Synthetic
gguguaaacugagcuugcucgc

SEQ ID NO: 5227 - RNA, 23 nt, Artificial Sequence
  Synthetic
ggguguaaacugagcuugcucgc

SEQ ID NO: 5228 - RNA, 24 nt, Artificial Sequence
  Synthetic
cggguguaaacugagcuugcucgc

SEQ ID NO: 5229 - RNA, 18 nt, Artificial Sequence
  Synthetic
cgcucgggagccucuugc

SEQ ID NO: 5230 - RNA, 19 nt, Artificial Sequence
  Synthetic
ucgcucgggagccucuugc

SEQ ID NO: 5231 - RNA, 20 nt, Artificial Sequence
  Synthetic
cucgcucgggagccucuugc

SEQ ID NO: 5232 - RNA, 21 nt, Artificial Sequence
  Synthetic
gcucgcucgggagccucuugc

SEQ ID NO: 5233 - RNA, 22 nt, Artificial Sequence
  Synthetic
ugcucgcucgggagccucuugc

SEQ ID NO: 5234 - RNA, 23 nt, Artificial Sequence
  Synthetic
uugcucgcucgggagccucuugc

SEQ ID NO: 5235 - RNA, 24 nt, Artificial Sequence
  Synthetic
cuugcucgcucgggagccucuugc

SEQ ID NO: 5236 - RNA, 18 nt, Artificial Sequence
  Synthetic
aacugagcuugcucgcuc

SEQ ID NO: 5237 - RNA, 19 nt, Artificial Sequence
  Synthetic
aaacugagcuugcucgcuc

SEQ ID NO: 5238 - RNA, 20 nt, Artificial Sequence
  Synthetic
uaaacugagcuugcucgcuc

SEQ ID NO: 5239 - RNA, 21 nt, Artificial Sequence
  Synthetic
guaaacugagcuugcucgcuc

SEQ ID NO: 5240 - RNA, 22 nt, Artificial Sequence
  Synthetic
uguaaacugagcuugcucgcuc

SEQ ID NO: 5241 - RNA, 23 nt, Artificial Sequence
  Synthetic
guguaaacugagcuugcucgcuc

SEQ ID NO: 5242 - RNA, 24 nt, Artificial Sequence
  Synthetic
gguguaaacugagcuugcucgcuc

SEQ ID NO: 5243 - RNA, 18 nt, Artificial Sequence
  Synthetic
augacuaucuuuaauguc

SEQ ID NO: 5244 - RNA, 19 nt, Artificial Sequence
  Synthetic
gaugacuaucuuuaauguc

SEQ ID NO: 5245 - RNA, 20 nt, Artificial Sequence
  Synthetic
agaugacuaucuuuaauguc

SEQ ID NO: 5246 - RNA, 21 nt, Artificial Sequence
  Synthetic
aagaugacuaucuuuaauguc

SEQ ID NO: 5247 - RNA, 22 nt, Artificial Sequence
  Synthetic
caagaugacuaucuuuaauguc

SEQ ID NO: 5248 - RNA, 23 nt, Artificial Sequence
  Synthetic
ccaagaugacuaucuuuaauguc

SEQ ID NO: 5249 - RNA, 24 nt, Artificial Sequence
  Synthetic
cccaagaugacuaucuuuaauguc

SEQ ID NO: 5250 - RNA, 18 nt, Artificial Sequence
  Synthetic
auucaggccaaagaauuc

SEQ ID NO: 5251 - RNA, 19 nt, Artificial Sequence
  Synthetic
uauucaggccaaagaauuc

SEQ ID NO: 5252 - RNA, 20 nt, Artificial Sequence
  Synthetic
uuauucaggccaaagaauuc

SEQ ID NO: 5253 - RNA, 21 nt, Artificial Sequence
  Synthetic
auuauucaggccaaagaauuc

SEQ ID NO: 5254 - RNA, 22 nt, Artificial Sequence
  Synthetic
aauuauucaggccaaagaauuc

SEQ ID NO: 5255 - RNA, 23 nt, Artificial Sequence
  Synthetic
caauuauucaggccaaagaauuc

SEQ ID NO: 5256 - RNA, 24 nt, Artificial Sequence
  Synthetic
gcaauuauucaggccaaagaauuc

SEQ ID NO: 5257 - RNA, 18 nt, Artificial Sequence
  Synthetic
aucugguaaagaugauuc

SEQ ID NO: 5258 - RNA, 19 nt, Artificial Sequence
  Synthetic
gaucugguaaagaugauuc

SEQ ID NO: 5259 - RNA, 20 nt, Artificial Sequence
  Synthetic
agaucugguaaagaugauuc

SEQ ID NO: 5260 - RNA, 21 nt, Artificial Sequence
  Synthetic
gagaucugguaaagaugauuc

SEQ ID NO: 5261 - RNA, 22 nt, Artificial Sequence
  Synthetic
ugagaucugguaaagaugauuc

SEQ ID NO: 5262 - RNA, 23 nt, Artificial Sequence
  Synthetic
uugagaucugguaaagaugauuc

SEQ ID NO: 5263 - RNA, 24 nt, Artificial Sequence
  Synthetic
uuugagaucugguaaagaugauuc

SEQ ID NO: 5264 - RNA, 18 nt, Artificial Sequence
  Synthetic
aauuccuggaagguguuc

SEQ ID NO: 5265 - RNA, 19 nt, Artificial Sequence
  Synthetic
gaauuccuggaagguguuc

SEQ ID NO: 5266 - RNA, 20 nt, Artificial Sequence
  Synthetic
agaauuccuggaagguguuc

SEQ ID NO: 5267 - RNA, 21 nt, Artificial Sequence
  Synthetic
aagaauuccuggaagguguuc

SEQ ID NO: 5268 - RNA, 22 nt, Artificial Sequence
  Synthetic
aaagaauuccuggaagguguuc

SEQ ID NO: 5269 - RNA, 23 nt, Artificial Sequence
  Synthetic
caaagaauuccuggaagguguuc

SEQ ID NO: 5270 - RNA, 24 nt, Artificial Sequence
  Synthetic
ccaaagaauuccuggaagguguuc

SEQ ID NO: 5271 - RNA, 18 nt, Artificial Sequence
  Synthetic
auguuguagggagcccag

SEQ ID NO: 5272 - RNA, 19 nt, Artificial Sequence
  Synthetic
aauguuguagggagcccag

SEQ ID NO: 5273 - RNA, 20 nt, Artificial Sequence
  Synthetic
caauguuguagggagcccag

SEQ ID NO: 5274 - RNA, 21 nt, Artificial Sequence
  Synthetic
acaauguuguagggagcccag

SEQ ID NO: 5275 - RNA, 22 nt, Artificial Sequence
  Synthetic
gacaauguuguagggagcccag

SEQ ID NO: 5276 - RNA, 23 nt, Artificial Sequence
  Synthetic
ggacaauguuguagggagcccag

SEQ ID NO: 5277 - RNA, 24 nt, Artificial Sequence
  Synthetic
aggacaauguuguagggagcccag

SEQ ID NO: 5278 - RNA, 18 nt, Artificial Sequence
  Synthetic
uuccuggaagguguucag

SEQ ID NO: 5279 - RNA, 19 nt, Artificial Sequence
  Synthetic
auuccuggaagguguucag

SEQ ID NO: 5280 - RNA, 20 nt, Artificial Sequence
  Synthetic
aauuccuggaagguguucag

SEQ ID NO: 5281 - RNA, 21 nt, Artificial Sequence
  Synthetic
gaauuccuggaagguguucag

SEQ ID NO: 5282 - RNA, 22 nt, Artificial Sequence
  Synthetic
agaauuccuggaagguguucag

SEQ ID NO: 5283 - RNA, 23 nt, Artificial Sequence
  Synthetic
aagaauuccuggaagguguucag

SEQ ID NO: 5284 - RNA, 24 nt, Artificial Sequence
  Synthetic
aaagaauuccuggaagguguucag

SEQ ID NO: 5285 - RNA, 18 nt, Artificial Sequence
  Synthetic
cuggaagguguucaggag

SEQ ID NO: 5286 - RNA, 19 nt, Artificial Sequence
  Synthetic
ccuggaagguguucaggag

SEQ ID NO: 5287 - RNA, 20 nt, Artificial Sequence
  Synthetic
uccuggaagguguucaggag

SEQ ID NO: 5288 - RNA, 21 nt, Artificial Sequence
  Synthetic
uuccuggaagguguucaggag

SEQ ID NO: 5289 - RNA, 22 nt, Artificial Sequence
  Synthetic
auuccuggaagguguucaggag

SEQ ID NO: 5290 - RNA, 23 nt, Artificial Sequence
  Synthetic
aauuccuggaagguguucaggag

SEQ ID NO: 5291 - RNA, 24 nt, Artificial Sequence
  Synthetic
gaauuccuggaagguguucaggag

SEQ ID NO: 5292 - RNA, 18 nt, Artificial Sequence
  Synthetic
gaccaugacaagcagcgg

SEQ ID NO: 5293 - RNA, 19 nt, Artificial Sequence
  Synthetic
ugaccaugacaagcagcgg

SEQ ID NO: 5294 - RNA, 20 nt, Artificial Sequence
  Synthetic
augaccaugacaagcagcgg

SEQ ID NO: 5295 - RNA, 21 nt, Artificial Sequence
  Synthetic
gaugaccaugacaagcagcgg

SEQ ID NO: 5296 - RNA, 22 nt, Artificial Sequence
  Synthetic
agaugaccaugacaagcagcgg

SEQ ID NO: 5297 - RNA, 23 nt, Artificial Sequence
  Synthetic
cagaugaccaugacaagcagcgg

SEQ ID NO: 5298 - RNA, 24 nt, Artificial Sequence
  Synthetic
gcagaugaccaugacaagcagcgg

SEQ ID NO: 5299 - RNA, 18 nt, Artificial Sequence
  Synthetic
gguaaagaugauuccugg

SEQ ID NO: 5300 - RNA, 19 nt, Artificial Sequence
  Synthetic
ugguaaagaugauuccugg

SEQ ID NO: 5301 - RNA, 20 nt, Artificial Sequence
  Synthetic
cugguaaagaugauuccugg

SEQ ID NO: 5302 - RNA, 21 nt, Artificial Sequence
  Synthetic
ucugguaaagaugauuccugg

SEQ ID NO: 5303 - RNA, 22 nt, Artificial Sequence
  Synthetic
aucugguaaagaugauuccugg

SEQ ID NO: 5304 - RNA, 23 nt, Artificial Sequence
  Synthetic
gaucugguaaagaugauuccugg

SEQ ID NO: 5305 - RNA, 24 nt, Artificial Sequence
  Synthetic
agaucugguaaagaugauuccugg

SEQ ID NO: 5306 - RNA, 18 nt, Artificial Sequence
  Synthetic
uuggcaaugugcuuuugg

SEQ ID NO: 5307 - RNA, 19 nt, Artificial Sequence
  Synthetic
uuuggcaaugugcuuuugg

SEQ ID NO: 5308 - RNA, 20 nt, Artificial Sequence
  Synthetic
guuuggcaaugugcuuuugg

SEQ ID NO: 5309 - RNA, 21 nt, Artificial Sequence
  Synthetic
cguuuggcaaugugcuuuugg

SEQ ID NO: 5310 - RNA, 22 nt, Artificial Sequence
  Synthetic
gcguuuggcaaugugcuuuugg

SEQ ID NO: 5311 - RNA, 23 nt, Artificial Sequence
  Synthetic
agcguuuggcaaugugcuuuugg

SEQ ID NO: 5312 - RNA, 24 nt, Artificial Sequence
  Synthetic
aagcguuuggcaaugugcuuuugg

SEQ ID NO: 5313 - RNA, 18 nt, Artificial Sequence
  Synthetic
ccgacaaaggcauagaug

SEQ ID NO: 5314 - RNA, 19 nt, Artificial Sequence
  Synthetic
cccgacaaaggcauagaug

SEQ ID NO: 5315 - RNA, 20 nt, Artificial Sequence
  Synthetic
ccccgacaaaggcauagaug

SEQ ID NO: 5316 - RNA, 21 nt, Artificial Sequence
  Synthetic
uccccgacaaaggcauagaug

SEQ ID NO: 5317 - RNA, 22 nt, Artificial Sequence
  Synthetic
cuccccgacaaaggcauagaug

SEQ ID NO: 5318 - RNA, 23 nt, Artificial Sequence
  Synthetic
ucuccccgacaaaggcauagaug

SEQ ID NO: 5319 - RNA, 24 nt, Artificial Sequence
  Synthetic
uucuccccgacaaaggcauagaug

SEQ ID NO: 5320 - RNA, 18 nt, Artificial Sequence
  Synthetic
aaauaaacaaucaugaug

SEQ ID NO: 5321 - RNA, 19 nt, Artificial Sequence
  Synthetic
aaaauaaacaaucaugaug

SEQ ID NO: 5322 - RNA, 20 nt, Artificial Sequence
  Synthetic
gaaaauaaacaaucaugaug

SEQ ID NO: 5323 - RNA, 21 nt, Artificial Sequence
  Synthetic
agaaaauaaacaaucaugaug

SEQ ID NO: 5324 - RNA, 22 nt, Artificial Sequence
  Synthetic
gagaaaauaaacaaucaugaug

SEQ ID NO: 5325 - RNA, 23 nt, Artificial Sequence
  Synthetic
agagaaaauaaacaaucaugaug

SEQ ID NO: 5326 - RNA, 24 nt, Artificial Sequence
  Synthetic
aagagaaaauaaacaaucaugaug

SEQ ID NO: 5327 - RNA, 18 nt, Artificial Sequence
  Synthetic
ucgcucgggagccucuug

SEQ ID NO: 5328 - RNA, 19 nt, Artificial Sequence
  Synthetic
cucgcucgggagccucuug

SEQ ID NO: 5329 - RNA, 20 nt, Artificial Sequence
  Synthetic
gcucgcucgggagccucuug

SEQ ID NO: 5330 - RNA, 21 nt, Artificial Sequence
  Synthetic
ugcucgcucgggagccucuug

SEQ ID NO: 5331 - RNA, 22 nt, Artificial Sequence
  Synthetic
uugcucgcucgggagccucuug

SEQ ID NO: 5332 - RNA, 23 nt, Artificial Sequence
  Synthetic
cuugcucgcucgggagccucuug

SEQ ID NO: 5333 - RNA, 24 nt, Artificial Sequence
  Synthetic
gcuugcucgcucgggagccucuug

SEQ ID NO: 5334 - RNA, 18 nt, Artificial Sequence
  Synthetic
aggagaaggacaauguug

SEQ ID NO: 5335 - RNA, 19 nt, Artificial Sequence
  Synthetic
caggagaaggacaauguug

SEQ ID NO: 5336 - RNA, 20 nt, Artificial Sequence
  Synthetic
ucaggagaaggacaauguug

SEQ ID NO: 5337 - RNA, 21 nt, Artificial Sequence
  Synthetic
uucaggagaaggacaauguug

SEQ ID NO: 5338 - RNA, 22 nt, Artificial Sequence
  Synthetic
guucaggagaaggacaauguug

SEQ ID NO: 5339 - RNA, 23 nt, Artificial Sequence
  Synthetic
uguucaggagaaggacaauguug

SEQ ID NO: 5340 - RNA, 24 nt, Artificial Sequence
  Synthetic
guguucaggagaaggacaauguug

SEQ ID NO: 5341 - RNA, 18 nt, Artificial Sequence
  Synthetic
aaaauagaacagcauuug

SEQ ID NO: 5342 - RNA, 19 nt, Artificial Sequence
  Synthetic
gaaaauagaacagcauuug

SEQ ID NO: 5343 - RNA, 20 nt, Artificial Sequence
  Synthetic
ggaaaauagaacagcauuug

SEQ ID NO: 5344 - RNA, 21 nt, Artificial Sequence
  Synthetic
uggaaaauagaacagcauuug

SEQ ID NO: 5345 - RNA, 22 nt, Artificial Sequence
  Synthetic
cuggaaaauagaacagcauuug

SEQ ID NO: 5346 - RNA, 23 nt, Artificial Sequence
  Synthetic
gcuggaaaauagaacagcauuug

SEQ ID NO: 5347 - RNA, 24 nt, Artificial Sequence
  Synthetic
ugcuggaaaauagaacagcauuug

SEQ ID NO: 5348 - RNA, 18 nt, Artificial Sequence
  Synthetic
acugacuguauggaaaau

SEQ ID NO: 5349 - RNA, 19 nt, Artificial Sequence
  Synthetic
uacugacuguauggaaaau

SEQ ID NO: 5350 - RNA, 20 nt, Artificial Sequence
  Synthetic
auacugacuguauggaaaau

SEQ ID NO: 5351 - RNA, 21 nt, Artificial Sequence
  Synthetic
gauacugacuguauggaaaau

SEQ ID NO: 5352 - RNA, 22 nt, Artificial Sequence
  Synthetic
ugauacugacuguauggaaaau

SEQ ID NO: 5353 - RNA, 23 nt, Artificial Sequence
  Synthetic
uugauacugacuguauggaaaau

SEQ ID NO: 5354 - RNA, 24 nt, Artificial Sequence
  Synthetic
auugauacugacuguauggaaaau

SEQ ID NO: 5355 - RNA, 18 nt, Artificial Sequence
  Synthetic
ugcuuuuggaagaagacu

SEQ ID NO: 5356 - RNA, 19 nt, Artificial Sequence
  Synthetic
gugcuuuuggaagaagacu

SEQ ID NO: 5357 - RNA, 20 nt, Artificial Sequence
  Synthetic
ugugcuuuuggaagaagacu

SEQ ID NO: 5358 - RNA, 21 nt, Artificial Sequence
  Synthetic
augugcuuuuggaagaagacu

SEQ ID NO: 5359 - RNA, 22 nt, Artificial Sequence
  Synthetic
aaugugcuuuuggaagaagacu

SEQ ID NO: 5360 - RNA, 23 nt, Artificial Sequence
  Synthetic
caaugugcuuuuggaagaagacu

SEQ ID NO: 5361 - RNA, 24 nt, Artificial Sequence
  Synthetic
gcaaugugcuuuuggaagaagacu

SEQ ID NO: 5362 - RNA, 18 nt, Artificial Sequence
  Synthetic
cugguaaagaugauuccu

SEQ ID NO: 5363 - RNA, 19 nt, Artificial Sequence
  Synthetic
ucugguaaagaugauuccu

SEQ ID NO: 5364 - RNA, 20 nt, Artificial Sequence
  Synthetic
aucugguaaagaugauuccu

SEQ ID NO: 5365 - RNA, 21 nt, Artificial Sequence
  Synthetic
gaucugguaaagaugauuccu

SEQ ID NO: 5366 - RNA, 22 nt, Artificial Sequence
  Synthetic
agaucugguaaagaugauuccu

SEQ ID NO: 5367 - RNA, 23 nt, Artificial Sequence
  Synthetic
gagaucugguaaagaugauuccu

SEQ ID NO: 5368 - RNA, 24 nt, Artificial Sequence
  Synthetic
ugagaucugguaaagaugauuccu

SEQ ID NO: 5369 - RNA, 18 nt, Artificial Sequence
  Synthetic
aaacugagcuugcucgcu

SEQ ID NO: 5370 - RNA, 19 nt, Artificial Sequence
  Synthetic
uaaacugagcuugcucgcu

SEQ ID NO: 5371 - RNA, 20 nt, Artificial Sequence
  Synthetic
guaaacugagcuugcucgcu

SEQ ID NO: 5372 - RNA, 21 nt, Artificial Sequence
  Synthetic
uguaaacugagcuugcucgcu

SEQ ID NO: 5373 - RNA, 22 nt, Artificial Sequence
  Synthetic
guguaaacugagcuugcucgcu

SEQ ID NO: 5374 - RNA, 23 nt, Artificial Sequence
  Synthetic
gguguaaacugagcuugcucgcu

SEQ ID NO: 5375 - RNA, 24 nt, Artificial Sequence
  Synthetic
ggguguaaacugagcuugcucgcu

SEQ ID NO: 5376 - RNA, 18 nt, Artificial Sequence
  Synthetic
gaugacuaucuuuaaugu

SEQ ID NO: 5377 - RNA, 19 nt, Artificial Sequence
  Synthetic
agaugacuaucuuuaaugu

SEQ ID NO: 5378 - RNA, 20 nt, Artificial Sequence
  Synthetic
aagaugacuaucuuuaaugu

SEQ ID NO: 5379 - RNA, 21 nt, Artificial Sequence
  Synthetic
caagaugacuaucuuuaaugu

SEQ ID NO: 5380 - RNA, 22 nt, Artificial Sequence
  Synthetic
ccaagaugacuaucuuuaaugu

SEQ ID NO: 5381 - RNA, 23 nt, Artificial Sequence
  Synthetic
cccaagaugacuaucuuuaaugu

SEQ ID NO: 5382 - RNA, 24 nt, Artificial Sequence
  Synthetic
ccccaagaugacuaucuuuaaugu

SEQ ID NO: 5383 - RNA, 18 nt, Artificial Sequence
  Synthetic
agaauugauacugacugu

SEQ ID NO: 5384 - RNA, 19 nt, Artificial Sequence
  Synthetic
cagaauugauacugacugu

SEQ ID NO: 5385 - RNA, 20 nt, Artificial Sequence
  Synthetic
ccagaauugauacugacugu

SEQ ID NO: 5386 - RNA, 21 nt, Artificial Sequence
  Synthetic
uccagaauugauacugacugu

SEQ ID NO: 5387 - RNA, 22 nt, Artificial Sequence
  Synthetic
uuccagaauugauacugacugu

SEQ ID NO: 5388 - RNA, 23 nt, Artificial Sequence
  Synthetic
cuuccagaauugauacugacugu

SEQ ID NO: 5389 - RNA, 24 nt, Artificial Sequence
  Synthetic
ucuuccagaauugauacugacugu

SEQ ID NO: 5390 - RNA, 18 nt, Artificial Sequence
  Synthetic
uagcuugguccaaccugu

SEQ ID NO: 5391 - RNA, 19 nt, Artificial Sequence
  Synthetic
auagcuugguccaaccugu

SEQ ID NO: 5392 - RNA, 20 nt, Artificial Sequence
  Synthetic
cauagcuugguccaaccugu

SEQ ID NO: 5393 - RNA, 21 nt, Artificial Sequence
  Synthetic
gcauagcuugguccaaccugu

SEQ ID NO: 5394 - RNA, 22 nt, Artificial Sequence
  Synthetic
ugcauagcuugguccaaccugu

SEQ ID NO: 5395 - RNA, 23 nt, Artificial Sequence
  Synthetic
cugcauagcuugguccaaccugu

SEQ ID NO: 5396 - RNA, 24 nt, Artificial Sequence
  Synthetic
ccugcauagcuugguccaaccugu

SEQ ID NO: 5397 - RNA, 18 nt, Artificial Sequence
  Synthetic
ggagaaggacaauguugu

SEQ ID NO: 5398 - RNA, 19 nt, Artificial Sequence
  Synthetic
aggagaaggacaauguugu

SEQ ID NO: 5399 - RNA, 20 nt, Artificial Sequence
  Synthetic
caggagaaggacaauguugu

SEQ ID NO: 5400 - RNA, 21 nt, Artificial Sequence
  Synthetic
ucaggagaaggacaauguugu

SEQ ID NO: 5401 - RNA, 22 nt, Artificial Sequence
  Synthetic
uucaggagaaggacaauguugu

SEQ ID NO: 5402 - RNA, 23 nt, Artificial Sequence
  Synthetic
guucaggagaaggacaauguugu

SEQ ID NO: 5403 - RNA, 24 nt, Artificial Sequence
  Synthetic
uguucaggagaaggacaauguugu

SEQ ID NO: 5404 - RNA, 18 nt, Artificial Sequence
  Synthetic
gcguuuggcaaugugcuu

SEQ ID NO: 5405 - RNA, 19 nt, Artificial Sequence
  Synthetic
agcguuuggcaaugugcuu

SEQ ID NO: 5406 - RNA, 20 nt, Artificial Sequence
  Synthetic
aagcguuuggcaaugugcuu

SEQ ID NO: 5407 - RNA, 21 nt, Artificial Sequence
  Synthetic
gaagcguuuggcaaugugcuu

SEQ ID NO: 5408 - RNA, 22 nt, Artificial Sequence
  Synthetic
agaagcguuuggcaaugugcuu

SEQ ID NO: 5409 - RNA, 23 nt, Artificial Sequence
  Synthetic
cagaagcguuuggcaaugugcuu

SEQ ID NO: 5410 - RNA, 24 nt, Artificial Sequence
  Synthetic
gcagaagcguuuggcaaugugcuu

SEQ ID NO: 5411 - RNA, 18 nt, Artificial Sequence
  Synthetic
gaauuccuggaagguguu

SEQ ID NO: 5412 - RNA, 19 nt, Artificial Sequence
  Synthetic
agaauuccuggaagguguu

SEQ ID NO: 5413 - RNA, 20 nt, Artificial Sequence
  Synthetic
aagaauuccuggaagguguu

SEQ ID NO: 5414 - RNA, 21 nt, Artificial Sequence
  Synthetic
aaagaauuccuggaagguguu

SEQ ID NO: 5415 - RNA, 22 nt, Artificial Sequence
  Synthetic
caaagaauuccuggaagguguu

SEQ ID NO: 5416 - RNA, 23 nt, Artificial Sequence
  Synthetic
ccaaagaauuccuggaagguguu

SEQ ID NO: 5417 - RNA, 24 nt, Artificial Sequence
  Synthetic
gccaaagaauuccuggaagguguu

SEQ ID NO: 5418 - RNA, 18 nt, Artificial Sequence
  Synthetic
cguuuggcaaugugcuuu

SEQ ID NO: 5419 - RNA, 19 nt, Artificial Sequence
  Synthetic
gcguuuggcaaugugcuuu

SEQ ID NO: 5420 - RNA, 20 nt, Artificial Sequence
  Synthetic
agcguuuggcaaugugcuuu

SEQ ID NO: 5421 - RNA, 21 nt, Artificial Sequence
  Synthetic
aagcguuuggcaaugugcuuu

SEQ ID NO: 5422 - RNA, 22 nt, Artificial Sequence
  Synthetic
gaagcguuuggcaaugugcuuu

SEQ ID NO: 5423 - RNA, 23 nt, Artificial Sequence
  Synthetic
agaagcguuuggcaaugugcuuu

SEQ ID NO: 5424 - RNA, 24 nt, Artificial Sequence
  Synthetic
cagaagcguuuggcaaugugcuuu

SEQ ID NO: 5425 - RNA, 18 nt, Artificial Sequence
  Synthetic
guaaugaagaccuucuuu

SEQ ID NO: 5426 - RNA, 19 nt, Artificial Sequence
  Synthetic
uguaaugaagaccuucuuu

SEQ ID NO: 5427 - RNA, 20 nt, Artificial Sequence
  Synthetic
guguaaugaagaccuucuuu

SEQ ID NO: 5428 - RNA, 21 nt, Artificial Sequence
  Synthetic
gguguaaugaagaccuucuuu

SEQ ID NO: 5429 - RNA, 22 nt, Artificial Sequence
  Synthetic
agguguaaugaagaccuucuuu

SEQ ID NO: 5430 - RNA, 23 nt, Artificial Sequence
  Synthetic
cagguguaaugaagaccuucuuu

SEQ ID NO: 5431 - RNA, 24 nt, Artificial Sequence
  Synthetic
gcagguguaaugaagaccuucuuu

SEQ ID NO: 5432 - RNA, 18 nt, Artificial Sequence
  Synthetic
aagacuaagagguaguuu

SEQ ID NO: 5433 - RNA, 19 nt, Artificial Sequence
  Synthetic
gaagacuaagagguaguuu

SEQ ID NO: 5434 - RNA, 20 nt, Artificial Sequence
  Synthetic
agaagacuaagagguaguuu

SEQ ID NO: 5435 - RNA, 21 nt, Artificial Sequence
  Synthetic
aagaagacuaagagguaguuu

SEQ ID NO: 5436 - RNA, 22 nt, Artificial Sequence
  Synthetic
gaagaagacuaagagguaguuu

SEQ ID NO: 5437 - RNA, 23 nt, Artificial Sequence
  Synthetic
ggaagaagacuaagagguaguuu

SEQ ID NO: 5438 - RNA, 24 nt, Artificial Sequence
  Synthetic
uggaagaagacuaagagguaguuu

SEQ ID NO: 5439 - RNA, 18 nt, Artificial Sequence
  Synthetic
ucuuuaccagaucucaaa

SEQ ID NO: 5440 - RNA, 19 nt, Artificial Sequence
  Synthetic
aucuuuaccagaucucaaa

SEQ ID NO: 5441 - RNA, 20 nt, Artificial Sequence
  Synthetic
caucuuuaccagaucucaaa

SEQ ID NO: 5442 - RNA, 21 nt, Artificial Sequence
  Synthetic
ucaucuuuaccagaucucaaa

SEQ ID NO: 5443 - RNA, 22 nt, Artificial Sequence
  Synthetic
aucaucuuuaccagaucucaaa

SEQ ID NO: 5444 - RNA, 23 nt, Artificial Sequence
  Synthetic
aaucaucuuuaccagaucucaaa

SEQ ID NO: 5445 - RNA, 24 nt, Artificial Sequence
  Synthetic
gaaucaucuuuaccagaucucaaa

SEQ ID NO: 5446 - RNA, 18 nt, Artificial Sequence
  Synthetic
cuugugacacggacucaa

SEQ ID NO: 5447 - RNA, 19 nt, Artificial Sequence
  Synthetic
gcuugugacacggacucaa

SEQ ID NO: 5448 - RNA, 20 nt, Artificial Sequence
  Synthetic
ggcuugugacacggacucaa

SEQ ID NO: 5449 - RNA, 21 nt, Artificial Sequence
  Synthetic
gggcuugugacacggacucaa

SEQ ID NO: 5450 - RNA, 22 nt, Artificial Sequence
  Synthetic
ugggcuugugacacggacucaa

SEQ ID NO: 5451 - RNA, 23 nt, Artificial Sequence
  Synthetic
gugggcuugugacacggacucaa

SEQ ID NO: 5452 - RNA, 24 nt, Artificial Sequence
  Synthetic
ugugggcuugugacacggacucaa

SEQ ID NO: 5453 - RNA, 18 nt, Artificial Sequence
  Synthetic
cucugcuucggugucgaa

SEQ ID NO: 5454 - RNA, 19 nt, Artificial Sequence
  Synthetic
acucugcuucggugucgaa

SEQ ID NO: 5455 - RNA, 20 nt, Artificial Sequence
  Synthetic
aacucugcuucggugucgaa

SEQ ID NO: 5456 - RNA, 21 nt, Artificial Sequence
  Synthetic
aaacucugcuucggugucgaa

SEQ ID NO: 5457 - RNA, 22 nt, Artificial Sequence
  Synthetic
aaaacucugcuucggugucgaa

SEQ ID NO: 5458 - RNA, 23 nt, Artificial Sequence
  Synthetic
aaaaacucugcuucggugucgaa

SEQ ID NO: 5459 - RNA, 24 nt, Artificial Sequence
  Synthetic
uaaaaacucugcuucggugucgaa

SEQ ID NO: 5460 - RNA, 18 nt, Artificial Sequence
  Synthetic
caguuuacacccgaucca

SEQ ID NO: 5461 - RNA, 19 nt, Artificial Sequence
  Synthetic
ucaguuuacacccgaucca

SEQ ID NO: 5462 - RNA, 20 nt, Artificial Sequence
  Synthetic
cucaguuuacacccgaucca

SEQ ID NO: 5463 - RNA, 21 nt, Artificial Sequence
  Synthetic
gcucaguuuacacccgaucca

SEQ ID NO: 5464 - RNA, 22 nt, Artificial Sequence
  Synthetic
agcucaguuuacacccgaucca

SEQ ID NO: 5465 - RNA, 23 nt, Artificial Sequence
  Synthetic
aagcucaguuuacacccgaucca

SEQ ID NO: 5466 - RNA, 24 nt, Artificial Sequence
  Synthetic
caagcucaguuuacacccgaucca

SEQ ID NO: 5467 - RNA, 18 nt, Artificial Sequence
  Synthetic
aaaugagaagaagaggca

SEQ ID NO: 5468 - RNA, 19 nt, Artificial Sequence
  Synthetic
gaaaugagaagaagaggca

SEQ ID NO: 5469 - RNA, 20 nt, Artificial Sequence
  Synthetic
cgaaaugagaagaagaggca

SEQ ID NO: 5470 - RNA, 21 nt, Artificial Sequence
  Synthetic
ucgaaaugagaagaagaggca

SEQ ID NO: 5471 - RNA, 22 nt, Artificial Sequence
  Synthetic
gucgaaaugagaagaagaggca

SEQ ID NO: 5472 - RNA, 23 nt, Artificial Sequence
  Synthetic
ugucgaaaugagaagaagaggca

SEQ ID NO: 5473 - RNA, 24 nt, Artificial Sequence
  Synthetic
gugucgaaaugagaagaagaggca

SEQ ID NO: 5474 - RNA, 18 nt, Artificial Sequence
  Synthetic
ccagcaagaggcucccga

SEQ ID NO: 5475 - RNA, 19 nt, Artificial Sequence
  Synthetic
uccagcaagaggcucccga

SEQ ID NO: 5476 - RNA, 20 nt, Artificial Sequence
  Synthetic
uuccagcaagaggcucccga

SEQ ID NO: 5477 - RNA, 21 nt, Artificial Sequence
  Synthetic
uuuccagcaagaggcucccga

SEQ ID NO: 5478 - RNA, 22 nt, Artificial Sequence
  Synthetic
uuuuccagcaagaggcucccga

SEQ ID NO: 5479 - RNA, 23 nt, Artificial Sequence
  Synthetic
auuuuccagcaagaggcucccga

SEQ ID NO: 5480 - RNA, 24 nt, Artificial Sequence
  Synthetic
uauuuuccagcaagaggcucccga

SEQ ID NO: 5481 - RNA, 18 nt, Artificial Sequence
  Synthetic
accaagcuaugcagguga

SEQ ID NO: 5482 - RNA, 19 nt, Artificial Sequence
  Synthetic
gaccaagcuaugcagguga

SEQ ID NO: 5483 - RNA, 20 nt, Artificial Sequence
  Synthetic
ggaccaagcuaugcagguga

SEQ ID NO: 5484 - RNA, 21 nt, Artificial Sequence
  Synthetic
uggaccaagcuaugcagguga

SEQ ID NO: 5485 - RNA, 22 nt, Artificial Sequence
  Synthetic
uuggaccaagcuaugcagguga

SEQ ID NO: 5486 - RNA, 23 nt, Artificial Sequence
  Synthetic
guuggaccaagcuaugcagguga

SEQ ID NO: 5487 - RNA, 24 nt, Artificial Sequence
  Synthetic
gguuggaccaagcuaugcagguga

SEQ ID NO: 5488 - RNA, 18 nt, Artificial Sequence
  Synthetic
aguuuacacccgauccac

SEQ ID NO: 5489 - RNA, 19 nt, Artificial Sequence
  Synthetic
caguuuacacccgauccac

SEQ ID NO: 5490 - RNA, 20 nt, Artificial Sequence
  Synthetic
ucaguuuacacccgauccac

SEQ ID NO: 5491 - RNA, 21 nt, Artificial Sequence
  Synthetic
cucaguuuacacccgauccac

SEQ ID NO: 5492 - RNA, 22 nt, Artificial Sequence
  Synthetic
gcucaguuuacacccgauccac

SEQ ID NO: 5493 - RNA, 23 nt, Artificial Sequence
  Synthetic
agcucaguuuacacccgauccac

SEQ ID NO: 5494 - RNA, 24 nt, Artificial Sequence
  Synthetic
aagcucaguuuacacccgauccac

SEQ ID NO: 5495 - RNA, 18 nt, Artificial Sequence
  Synthetic
uaucugugggcuugugac

SEQ ID NO: 5496 - RNA, 19 nt, Artificial Sequence
  Synthetic
auaucugugggcuugugac

SEQ ID NO: 5497 - RNA, 20 nt, Artificial Sequence
  Synthetic
aauaucugugggcuugugac

SEQ ID NO: 5498 - RNA, 21 nt, Artificial Sequence
  Synthetic
aaauaucugugggcuugugac

SEQ ID NO: 5499 - RNA, 22 nt, Artificial Sequence
  Synthetic
gaaauaucugugggcuugugac

SEQ ID NO: 5500 - RNA, 23 nt, Artificial Sequence
  Synthetic
ggaaauaucugugggcuugugac

SEQ ID NO: 5501 - RNA, 24 nt, Artificial Sequence
  Synthetic
aggaaauaucugugggcuugugac

SEQ ID NO: 5502 - RNA, 18 nt, Artificial Sequence
  Synthetic
gucauggucaucugcuac

SEQ ID NO: 5503 - RNA, 19 nt, Artificial Sequence
  Synthetic
ugucauggucaucugcuac

SEQ ID NO: 5504 - RNA, 20 nt, Artificial Sequence
  Synthetic
uugucauggucaucugcuac

SEQ ID NO: 5505 - RNA, 21 nt, Artificial Sequence
  Synthetic
cuugucauggucaucugcuac

SEQ ID NO: 5506 - RNA, 22 nt, Artificial Sequence
  Synthetic
gcuugucauggucaucugcuac

SEQ ID NO: 5507 - RNA, 23 nt, Artificial Sequence
  Synthetic
ugcuugucauggucaucugcuac

SEQ ID NO: 5508 - RNA, 24 nt, Artificial Sequence
  Synthetic
cugcuugucauggucaucugcuac

SEQ ID NO: 5509 - RNA, 18 nt, Artificial Sequence
  Synthetic
gcuguucuauuuuccagc

SEQ ID NO: 5510 - RNA, 19 nt, Artificial Sequence
  Synthetic
ugcuguucuauuuuccagc

SEQ ID NO: 5511 - RNA, 20 nt, Artificial Sequence
  Synthetic
augcuguucuauuuuccagc

SEQ ID NO: 5512 - RNA, 21 nt, Artificial Sequence
  Synthetic
aaugcuguucuauuuuccagc

SEQ ID NO: 5513 - RNA, 22 nt, Artificial Sequence
  Synthetic
aaaugcuguucuauuuuccagc

SEQ ID NO: 5514 - RNA, 23 nt, Artificial Sequence
  Synthetic
caaaugcuguucuauuuuccagc

SEQ ID NO: 5515 - RNA, 24 nt, Artificial Sequence
  Synthetic
gcaaaugcuguucuauuuuccagc

SEQ ID NO: 5516 - RNA, 18 nt, Artificial Sequence
  Synthetic
cccgauccacuggggagc

SEQ ID NO: 5517 - RNA, 19 nt, Artificial Sequence
  Synthetic
acccgauccacuggggagc

SEQ ID NO: 5518 - RNA, 20 nt, Artificial Sequence
  Synthetic
cacccgauccacuggggagc

SEQ ID NO: 5519 - RNA, 21 nt, Artificial Sequence
  Synthetic
acacccgauccacuggggagc

SEQ ID NO: 5520 - RNA, 22 nt, Artificial Sequence
  Synthetic
uacacccgauccacuggggagc

SEQ ID NO: 5521 - RNA, 23 nt, Artificial Sequence
  Synthetic
uuacacccgauccacuggggagc

SEQ ID NO: 5522 - RNA, 24 nt, Artificial Sequence
  Synthetic
uuuacacccgauccacuggggagc

SEQ ID NO: 5523 - RNA, 18 nt, Artificial Sequence
  Synthetic
acauuaaagauagucauc

SEQ ID NO: 5524 - RNA, 19 nt, Artificial Sequence
  Synthetic
gacauuaaagauagucauc

SEQ ID NO: 5525 - RNA, 20 nt, Artificial Sequence
  Synthetic
agacauuaaagauagucauc

SEQ ID NO: 5526 - RNA, 21 nt, Artificial Sequence
  Synthetic
cagacauuaaagauagucauc

SEQ ID NO: 5527 - RNA, 22 nt, Artificial Sequence
  Synthetic
ccagacauuaaagauagucauc

SEQ ID NO: 5528 - RNA, 23 nt, Artificial Sequence
  Synthetic
uccagacauuaaagauagucauc

SEQ ID NO: 5529 - RNA, 24 nt, Artificial Sequence
  Synthetic
uuccagacauuaaagauagucauc

SEQ ID NO: 5530 - RNA, 18 nt, Artificial Sequence
  Synthetic
ugcaggugacagagacuc

SEQ ID NO: 5531 - RNA, 19 nt, Artificial Sequence
  Synthetic
augcaggugacagagacuc

SEQ ID NO: 5532 - RNA, 20 nt, Artificial Sequence
  Synthetic
uaugcaggugacagagacuc

SEQ ID NO: 5533 - RNA, 21 nt, Artificial Sequence
  Synthetic
cuaugcaggugacagagacuc

SEQ ID NO: 5534 - RNA, 22 nt, Artificial Sequence
  Synthetic
gcuaugcaggugacagagacuc

SEQ ID NO: 5535 - RNA, 23 nt, Artificial Sequence
  Synthetic
agcuaugcaggugacagagacuc

SEQ ID NO: 5536 - RNA, 24 nt, Artificial Sequence
  Synthetic
aagcuaugcaggugacagagacuc

SEQ ID NO: 5537 - RNA, 18 nt, Artificial Sequence
  Synthetic
uuuuccagcaagaggcuc

SEQ ID NO: 5538 - RNA, 19 nt, Artificial Sequence
  Synthetic
auuuuccagcaagaggcuc

SEQ ID NO: 5539 - RNA, 20 nt, Artificial Sequence
  Synthetic
uauuuuccagcaagaggcuc

SEQ ID NO: 5540 - RNA, 21 nt, Artificial Sequence
  Synthetic
cuauuuuccagcaagaggcuc

SEQ ID NO: 5541 - RNA, 22 nt, Artificial Sequence
  Synthetic
ucuauuuuccagcaagaggcuc

SEQ ID NO: 5542 - RNA, 23 nt, Artificial Sequence
  Synthetic
uucuauuuuccagcaagaggcuc

SEQ ID NO: 5543 - RNA, 24 nt, Artificial Sequence
  Synthetic
guucuauuuuccagcaagaggcuc

SEQ ID NO: 5544 - RNA, 18 nt, Artificial Sequence
  Synthetic
uacaacauuguccuucuc

SEQ ID NO: 5545 - RNA, 19 nt, Artificial Sequence
  Synthetic
cuacaacauuguccuucuc

SEQ ID NO: 5546 - RNA, 20 nt, Artificial Sequence
  Synthetic
ccuacaacauuguccuucuc

SEQ ID NO: 5547 - RNA, 21 nt, Artificial Sequence
  Synthetic
cccuacaacauuguccuucuc

SEQ ID NO: 5548 - RNA, 22 nt, Artificial Sequence
  Synthetic
ucccuacaacauuguccuucuc

SEQ ID NO: 5549 - RNA, 23 nt, Artificial Sequence
  Synthetic
cucccuacaacauuguccuucuc

SEQ ID NO: 5550 - RNA, 24 nt, Artificial Sequence
  Synthetic
gcucccuacaacauuguccuucuc

SEQ ID NO: 5551 - RNA, 18 nt, Artificial Sequence
  Synthetic
aucaucuaugccuuuguc

SEQ ID NO: 5552 - RNA, 19 nt, Artificial Sequence
  Synthetic
caucaucuaugccuuuguc

SEQ ID NO: 5553 - RNA, 20 nt, Artificial Sequence
  Synthetic
ccaucaucuaugccuuuguc

SEQ ID NO: 5554 - RNA, 21 nt, Artificial Sequence
  Synthetic
cccaucaucuaugccuuuguc

SEQ ID NO: 5555 - RNA, 22 nt, Artificial Sequence
  Synthetic
ccccaucaucuaugccuuuguc

SEQ ID NO: 5556 - RNA, 23 nt, Artificial Sequence
  Synthetic
accccaucaucuaugccuuuguc

SEQ ID NO: 5557 - RNA, 24 nt, Artificial Sequence
  Synthetic
aaccccaucaucuaugccuuuguc

SEQ ID NO: 5558 - RNA, 18 nt, Artificial Sequence
  Synthetic
uacagucaguaucaauuc

SEQ ID NO: 5559 - RNA, 19 nt, Artificial Sequence
  Synthetic
auacagucaguaucaauuc

SEQ ID NO: 5560 - RNA, 20 nt, Artificial Sequence
  Synthetic
cauacagucaguaucaauuc

SEQ ID NO: 5561 - RNA, 21 nt, Artificial Sequence
  Synthetic
ccauacagucaguaucaauuc

SEQ ID NO: 5562 - RNA, 22 nt, Artificial Sequence
  Synthetic
uccauacagucaguaucaauuc

SEQ ID NO: 5563 - RNA, 23 nt, Artificial Sequence
  Synthetic
uuccauacagucaguaucaauuc

SEQ ID NO: 5564 - RNA, 24 nt, Artificial Sequence
  Synthetic
uuuccauacagucaguaucaauuc

SEQ ID NO: 5565 - RNA, 18 nt, Artificial Sequence
  Synthetic
cuucuccugaacaccuuc

SEQ ID NO: 5566 - RNA, 19 nt, Artificial Sequence
  Synthetic
ccuucuccugaacaccuuc

SEQ ID NO: 5567 - RNA, 20 nt, Artificial Sequence
  Synthetic
uccuucuccugaacaccuuc

SEQ ID NO: 5568 - RNA, 21 nt, Artificial Sequence
  Synthetic
guccuucuccugaacaccuuc

SEQ ID NO: 5569 - RNA, 22 nt, Artificial Sequence
  Synthetic
uguccuucuccugaacaccuuc

SEQ ID NO: 5570 - RNA, 23 nt, Artificial Sequence
  Synthetic
uuguccuucuccugaacaccuuc

SEQ ID NO: 5571 - RNA, 24 nt, Artificial Sequence
  Synthetic
auuguccuucuccugaacaccuuc

SEQ ID NO: 5572 - RNA, 18 nt, Artificial Sequence
  Synthetic
cggugucgaaaugagaag

SEQ ID NO: 5573 - RNA, 19 nt, Artificial Sequence
  Synthetic
ucggugucgaaaugagaag

SEQ ID NO: 5574 - RNA, 20 nt, Artificial Sequence
  Synthetic
uucggugucgaaaugagaag

SEQ ID NO: 5575 - RNA, 21 nt, Artificial Sequence
  Synthetic
cuucggugucgaaaugagaag

SEQ ID NO: 5576 - RNA, 22 nt, Artificial Sequence
  Synthetic
gcuucggugucgaaaugagaag

SEQ ID NO: 5577 - RNA, 23 nt, Artificial Sequence
  Synthetic
ugcuucggugucgaaaugagaag

SEQ ID NO: 5578 - RNA, 24 nt, Artificial Sequence
  Synthetic
cugcuucggugucgaaaugagaag

SEQ ID NO: 5579 - RNA, 18 nt, Artificial Sequence
  Synthetic
acccgauccacuggggag

SEQ ID NO: 5580 - RNA, 19 nt, Artificial Sequence
  Synthetic
cacccgauccacuggggag

SEQ ID NO: 5581 - RNA, 20 nt, Artificial Sequence
  Synthetic
acacccgauccacuggggag

SEQ ID NO: 5582 - RNA, 21 nt, Artificial Sequence
  Synthetic
uacacccgauccacuggggag

SEQ ID NO: 5583 - RNA, 22 nt, Artificial Sequence
  Synthetic
uuacacccgauccacuggggag

SEQ ID NO: 5584 - RNA, 23 nt, Artificial Sequence
  Synthetic
uuuacacccgauccacuggggag

SEQ ID NO: 5585 - RNA, 24 nt, Artificial Sequence
  Synthetic
guuuacacccgauccacuggggag

SEQ ID NO: 5586 - RNA, 18 nt, Artificial Sequence
  Synthetic
cuucggugucgaaaugag

SEQ ID NO: 5587 - RNA, 19 nt, Artificial Sequence
  Synthetic
gcuucggugucgaaaugag

SEQ ID NO: 5588 - RNA, 20 nt, Artificial Sequence
  Synthetic
ugcuucggugucgaaaugag

SEQ ID NO: 5589 - RNA, 21 nt, Artificial Sequence
  Synthetic
cugcuucggugucgaaaugag

SEQ ID NO: 5590 - RNA, 22 nt, Artificial Sequence
  Synthetic
ucugcuucggugucgaaaugag

SEQ ID NO: 5591 - RNA, 23 nt, Artificial Sequence
  Synthetic
cucugcuucggugucgaaaugag

SEQ ID NO: 5592 - RNA, 24 nt, Artificial Sequence
  Synthetic
acucugcuucggugucgaaaugag

SEQ ID NO: 5593 - RNA, 18 nt, Artificial Sequence
  Synthetic
ucaucuaugccuuugucg

SEQ ID NO: 5594 - RNA, 19 nt, Artificial Sequence
  Synthetic
aucaucuaugccuuugucg

SEQ ID NO: 5595 - RNA, 20 nt, Artificial Sequence
  Synthetic
caucaucuaugccuuugucg

SEQ ID NO: 5596 - RNA, 21 nt, Artificial Sequence
  Synthetic
ccaucaucuaugccuuugucg

SEQ ID NO: 5597 - RNA, 22 nt, Artificial Sequence
  Synthetic
cccaucaucuaugccuuugucg

SEQ ID NO: 5598 - RNA, 23 nt, Artificial Sequence
  Synthetic
ccccaucaucuaugccuuugucg

SEQ ID NO: 5599 - RNA, 24 nt, Artificial Sequence
  Synthetic
accccaucaucuaugccuuugucg

SEQ ID NO: 5600 - RNA, 18 nt, Artificial Sequence
  Synthetic
ugcaguagcucuaacagg

SEQ ID NO: 5601 - RNA, 19 nt, Artificial Sequence
  Synthetic
uugcaguagcucuaacagg

SEQ ID NO: 5602 - RNA, 20 nt, Artificial Sequence
  Synthetic
auugcaguagcucuaacagg

SEQ ID NO: 5603 - RNA, 21 nt, Artificial Sequence
  Synthetic
aauugcaguagcucuaacagg

SEQ ID NO: 5604 - RNA, 22 nt, Artificial Sequence
  Synthetic
uaauugcaguagcucuaacagg

SEQ ID NO: 5605 - RNA, 23 nt, Artificial Sequence
  Synthetic
auaauugcaguagcucuaacagg

SEQ ID NO: 5606 - RNA, 24 nt, Artificial Sequence
  Synthetic
aauaauugcaguagcucuaacagg

SEQ ID NO: 5607 - RNA, 18 nt, Artificial Sequence
  Synthetic
aucuaugccuuugucggg

SEQ ID NO: 5608 - RNA, 19 nt, Artificial Sequence
  Synthetic
caucuaugccuuugucggg

SEQ ID NO: 5609 - RNA, 20 nt, Artificial Sequence
  Synthetic
ucaucuaugccuuugucggg

SEQ ID NO: 5610 - RNA, 21 nt, Artificial Sequence
  Synthetic
aucaucuaugccuuugucggg

SEQ ID NO: 5611 - RNA, 22 nt, Artificial Sequence
  Synthetic
caucaucuaugccuuugucggg

SEQ ID NO: 5612 - RNA, 23 nt, Artificial Sequence
  Synthetic
ccaucaucuaugccuuugucggg

SEQ ID NO: 5613 - RNA, 24 nt, Artificial Sequence
  Synthetic
cccaucaucuaugccuuugucggg

SEQ ID NO: 5614 - RNA, 18 nt, Artificial Sequence
  Synthetic
uuuacacccgauccacug

SEQ ID NO: 5615 - RNA, 19 nt, Artificial Sequence
  Synthetic
guuuacacccgauccacug

SEQ ID NO: 5616 - RNA, 20 nt, Artificial Sequence
  Synthetic
aguuuacacccgauccacug

SEQ ID NO: 5617 - RNA, 21 nt, Artificial Sequence
  Synthetic
caguuuacacccgauccacug

SEQ ID NO: 5618 - RNA, 22 nt, Artificial Sequence
  Synthetic
ucaguuuacacccgauccacug

SEQ ID NO: 5619 - RNA, 23 nt, Artificial Sequence
  Synthetic
cucaguuuacacccgauccacug

SEQ ID NO: 5620 - RNA, 24 nt, Artificial Sequence
  Synthetic
gcucaguuuacacccgauccacug

SEQ ID NO: 5621 - RNA, 18 nt, Artificial Sequence
  Synthetic
aaaaacucugcuucggug

SEQ ID NO: 5622 - RNA, 19 nt, Artificial Sequence
  Synthetic
uaaaaacucugcuucggug

SEQ ID NO: 5623 - RNA, 20 nt, Artificial Sequence
  Synthetic
cuaaaaacucugcuucggug

SEQ ID NO: 5624 - RNA, 21 nt, Artificial Sequence
  Synthetic
ccuaaaaacucugcuucggug

SEQ ID NO: 5625 - RNA, 22 nt, Artificial Sequence
  Synthetic
uccuaaaaacucugcuucggug

SEQ ID NO: 5626 - RNA, 23 nt, Artificial Sequence
  Synthetic
auccuaaaaacucugcuucggug

SEQ ID NO: 5627 - RNA, 24 nt, Artificial Sequence
  Synthetic
aauccuaaaaacucugcuucggug

SEQ ID NO: 5628 - RNA, 18 nt, Artificial Sequence
  Synthetic
ccaucaucuaugccuuug

SEQ ID NO: 5629 - RNA, 19 nt, Artificial Sequence
  Synthetic
cccaucaucuaugccuuug

SEQ ID NO: 5630 - RNA, 20 nt, Artificial Sequence
  Synthetic
ccccaucaucuaugccuuug

SEQ ID NO: 5631 - RNA, 21 nt, Artificial Sequence
  Synthetic
accccaucaucuaugccuuug

SEQ ID NO: 5632 - RNA, 22 nt, Artificial Sequence
  Synthetic
aaccccaucaucuaugccuuug

SEQ ID NO: 5633 - RNA, 23 nt, Artificial Sequence
  Synthetic
caaccccaucaucuaugccuuug

SEQ ID NO: 5634 - RNA, 24 nt, Artificial Sequence
  Synthetic
ucaaccccaucaucuaugccuuug

SEQ ID NO: 5635 - RNA, 18 nt, Artificial Sequence
  Synthetic
cugcuucggugucgaaau

SEQ ID NO: 5636 - RNA, 19 nt, Artificial Sequence
  Synthetic
ucugcuucggugucgaaau

SEQ ID NO: 5637 - RNA, 20 nt, Artificial Sequence
  Synthetic
cucugcuucggugucgaaau

SEQ ID NO: 5638 - RNA, 21 nt, Artificial Sequence
  Synthetic
acucugcuucggugucgaaau

SEQ ID NO: 5639 - RNA, 22 nt, Artificial Sequence
  Synthetic
aacucugcuucggugucgaaau

SEQ ID NO: 5640 - RNA, 23 nt, Artificial Sequence
  Synthetic
aaacucugcuucggugucgaaau

SEQ ID NO: 5641 - RNA, 24 nt, Artificial Sequence
  Synthetic
aaaacucugcuucggugucgaaau

SEQ ID NO: 5642 - RNA, 18 nt, Artificial Sequence
  Synthetic
guuuacacccgauccacu

SEQ ID NO: 5643 - RNA, 19 nt, Artificial Sequence
  Synthetic
aguuuacacccgauccacu

SEQ ID NO: 5644 - RNA, 20 nt, Artificial Sequence
  Synthetic
caguuuacacccgauccacu

SEQ ID NO: 5645 - RNA, 21 nt, Artificial Sequence
  Synthetic
ucaguuuacacccgauccacu

SEQ ID NO: 5646 - RNA, 22 nt, Artificial Sequence
  Synthetic
cucaguuuacacccgauccacu

SEQ ID NO: 5647 - RNA, 23 nt, Artificial Sequence
  Synthetic
gcucaguuuacacccgauccacu

SEQ ID NO: 5648 - RNA, 24 nt, Artificial Sequence
  Synthetic
agcucaguuuacacccgauccacu

SEQ ID NO: 5649 - RNA, 18 nt, Artificial Sequence
  Synthetic
ucauggucaucugcuacu

SEQ ID NO: 5650 - RNA, 19 nt, Artificial Sequence
  Synthetic
gucauggucaucugcuacu

SEQ ID NO: 5651 - RNA, 20 nt, Artificial Sequence
  Synthetic
ugucauggucaucugcuacu

SEQ ID NO: 5652 - RNA, 21 nt, Artificial Sequence
  Synthetic
uugucauggucaucugcuacu

SEQ ID NO: 5653 - RNA, 22 nt, Artificial Sequence
  Synthetic
cuugucauggucaucugcuacu

SEQ ID NO: 5654 - RNA, 23 nt, Artificial Sequence
  Synthetic
gcuugucauggucaucugcuacu

SEQ ID NO: 5655 - RNA, 24 nt, Artificial Sequence
  Synthetic
ugcuugucauggucaucugcuacu

SEQ ID NO: 5656 - RNA, 18 nt, Artificial Sequence
  Synthetic
aagaagaggcacagggcu

SEQ ID NO: 5657 - RNA, 19 nt, Artificial Sequence
  Synthetic
gaagaagaggcacagggcu

SEQ ID NO: 5658 - RNA, 20 nt, Artificial Sequence
  Synthetic
agaagaagaggcacagggcu

SEQ ID NO: 5659 - RNA, 21 nt, Artificial Sequence
  Synthetic
gagaagaagaggcacagggcu

SEQ ID NO: 5660 - RNA, 22 nt, Artificial Sequence
  Synthetic
ugagaagaagaggcacagggcu

SEQ ID NO: 5661 - RNA, 23 nt, Artificial Sequence
  Synthetic
augagaagaagaggcacagggcu

SEQ ID NO: 5662 - RNA, 24 nt, Artificial Sequence
  Synthetic
aaugagaagaagaggcacagggcu

SEQ ID NO: 5663 - RNA, 18 nt, Artificial Sequence
  Synthetic
cauuaaagauagucaucu

SEQ ID NO: 5664 - RNA, 19 nt, Artificial Sequence
  Synthetic
acauuaaagauagucaucu

SEQ ID NO: 5665 - RNA, 20 nt, Artificial Sequence
  Synthetic
gacauuaaagauagucaucu

SEQ ID NO: 5666 - RNA, 21 nt, Artificial Sequence
  Synthetic
agacauuaaagauagucaucu

SEQ ID NO: 5667 - RNA, 22 nt, Artificial Sequence
  Synthetic
cagacauuaaagauagucaucu

SEQ ID NO: 5668 - RNA, 23 nt, Artificial Sequence
  Synthetic
ccagacauuaaagauagucaucu

SEQ ID NO: 5669 - RNA, 24 nt, Artificial Sequence
  Synthetic
uccagacauuaaagauagucaucu

SEQ ID NO: 5670 - RNA, 18 nt, Artificial Sequence
  Synthetic
ggggagcaggaaauaucu

SEQ ID NO: 5671 - RNA, 19 nt, Artificial Sequence
  Synthetic
uggggagcaggaaauaucu

SEQ ID NO: 5672 - RNA, 20 nt, Artificial Sequence
  Synthetic
cuggggagcaggaaauaucu

SEQ ID NO: 5673 - RNA, 21 nt, Artificial Sequence
  Synthetic
acuggggagcaggaaauaucu

SEQ ID NO: 5674 - RNA, 22 nt, Artificial Sequence
  Synthetic
cacuggggagcaggaaauaucu

SEQ ID NO: 5675 - RNA, 23 nt, Artificial Sequence
  Synthetic
ccacuggggagcaggaaauaucu

SEQ ID NO: 5676 - RNA, 24 nt, Artificial Sequence
  Synthetic
uccacuggggagcaggaaauaucu

SEQ ID NO: 5677 - RNA, 18 nt, Artificial Sequence
  Synthetic
caucaucuaugccuuugu

SEQ ID NO: 5678 - RNA, 19 nt, Artificial Sequence
  Synthetic
ccaucaucuaugccuuugu

SEQ ID NO: 5679 - RNA, 20 nt, Artificial Sequence
  Synthetic
cccaucaucuaugccuuugu

SEQ ID NO: 5680 - RNA, 21 nt, Artificial Sequence
  Synthetic
ccccaucaucuaugccuuugu

SEQ ID NO: 5681 - RNA, 22 nt, Artificial Sequence
  Synthetic
accccaucaucuaugccuuugu

SEQ ID NO: 5682 - RNA, 23 nt, Artificial Sequence
  Synthetic
aaccccaucaucuaugccuuugu

SEQ ID NO: 5683 - RNA, 24 nt, Artificial Sequence
  Synthetic
caaccccaucaucuaugccuuugu

SEQ ID NO: 5684 - RNA, 18 nt, Artificial Sequence
  Synthetic
auacagucaguaucaauu

SEQ ID NO: 5685 - RNA, 19 nt, Artificial Sequence
  Synthetic
cauacagucaguaucaauu

SEQ ID NO: 5686 - RNA, 20 nt, Artificial Sequence
  Synthetic
ccauacagucaguaucaauu

SEQ ID NO: 5687 - RNA, 21 nt, Artificial Sequence
  Synthetic
uccauacagucaguaucaauu

SEQ ID NO: 5688 - RNA, 22 nt, Artificial Sequence
  Synthetic
uuccauacagucaguaucaauu

SEQ ID NO: 5689 - RNA, 23 nt, Artificial Sequence
  Synthetic
uuuccauacagucaguaucaauu

SEQ ID NO: 5690 - RNA, 24 nt, Artificial Sequence
  Synthetic
uuuuccauacagucaguaucaauu

SEQ ID NO: 5691 - RNA, 18 nt, Artificial Sequence
  Synthetic
gauuguuuauuuucucuu

SEQ ID NO: 5692 - RNA, 19 nt, Artificial Sequence
  Synthetic
ugauuguuuauuuucucuu

SEQ ID NO: 5693 - RNA, 20 nt, Artificial Sequence
  Synthetic
augauuguuuauuuucucuu

SEQ ID NO: 5694 - RNA, 21 nt, Artificial Sequence
  Synthetic
caugauuguuuauuuucucuu

SEQ ID NO: 5695 - RNA, 22 nt, Artificial Sequence
  Synthetic
ucaugauuguuuauuuucucuu

SEQ ID NO: 5696 - RNA, 23 nt, Artificial Sequence
  Synthetic
aucaugauuguuuauuuucucuu

SEQ ID NO: 5697 - RNA, 24 nt, Artificial Sequence
  Synthetic
caucaugauuguuuauuuucucuu

SEQ ID NO: 5698 - RNA, 18 nt, Artificial Sequence
  Synthetic
cuuugucggggagaaguu

SEQ ID NO: 5699 - RNA, 19 nt, Artificial Sequence
  Synthetic
ccuuugucggggagaaguu

SEQ ID NO: 5700 - RNA, 20 nt, Artificial Sequence
  Synthetic
gccuuugucggggagaaguu

SEQ ID NO: 5701 - RNA, 21 nt, Artificial Sequence
  Synthetic
ugccuuugucggggagaaguu

SEQ ID NO: 5702 - RNA, 22 nt, Artificial Sequence
  Synthetic
augccuuugucggggagaaguu

SEQ ID NO: 5703 - RNA, 23 nt, Artificial Sequence
  Synthetic
uaugccuuugucggggagaaguu

SEQ ID NO: 5704 - RNA, 24 nt, Artificial Sequence
  Synthetic
cuaugccuuugucggggagaaguu

SEQ ID NO: 5705 - RNA, 17 nt, Artificial Sequence
  Synthetic
ugcacaggguggaacaa

SEQ ID NO: 5706 - RNA, 17 nt, Artificial Sequence
  Synthetic
ggcugcgauuugcuuca

SEQ ID NO: 5707 - RNA, 17 nt, Artificial Sequence
  Synthetic
gacgacagccagguacc

SEQ ID NO: 5708 - RNA, 17 nt, Artificial Sequence
  Synthetic
cggaggcaggaggcggg

SEQ ID NO: 5709 - RNA, 17 nt, Artificial Sequence
  Synthetic
uguauaauaauugaugu

SEQ ID NO: 5710 - RNA, 17 nt, Artificial Sequence
  Synthetic
gcugucguccaugcugu

SEQ ID NO: 5711 - RNA, 17 nt, Artificial Sequence
  Synthetic
ugacagggcucuauuuu

SEQ ID NO: 5712 - RNA, 20 nt, Artificial Sequence
  Synthetic
uuaugcacaggguggaacaa

SEQ ID NO: 5713 - RNA, 20 nt, Artificial Sequence
  Synthetic
gcgggcugcgauuugcuuca

SEQ ID NO: 5714 - RNA, 20 nt, Artificial Sequence
  Synthetic
auggacgacagccagguacc

SEQ ID NO: 5715 - RNA, 20 nt, Artificial Sequence
  Synthetic
gagcggaggcaggaggcggg

SEQ ID NO: 5716 - RNA, 20 nt, Artificial Sequence
  Synthetic
cgauguauaauaauugaugu

SEQ ID NO: 5717 - RNA, 20 nt, Artificial Sequence
  Synthetic
ucuugacagggcucuauuuu

SEQ ID NO: 5718 - RNA, 17 nt, Artificial Sequence
  Synthetic
uuuuugagaucugguaa

SEQ ID NO: 5719 - RNA, 17 nt, Artificial Sequence
  Synthetic
ugucaggaggaugauga

SEQ ID NO: 5720 - RNA, 17 nt, Artificial Sequence
  Synthetic
gcaggaggcgggcugcg

SEQ ID NO: 5721 - RNA, 17 nt, Artificial Sequence
  Synthetic
accccaaaggugaccgu

SEQ ID NO: 5722 - RNA, 20 nt, Artificial Sequence
  Synthetic
uucuuuuugagaucugguaa

SEQ ID NO: 5723 - RNA, 20 nt, Artificial Sequence
  Synthetic
gauugucaggaggaugauga

SEQ ID NO: 5724 - RNA, 20 nt, Artificial Sequence
  Synthetic
gaggcaggaggcgggcugcg

SEQ ID NO: 5725 - RNA, 20 nt, Artificial Sequence
  Synthetic
accaccccaaaggugaccgu

SEQ ID NO: 5726 - RNA, 20 nt, Artificial Sequence
  Synthetic
cuggcugucguccaugcugu

SEQ ID NO: 5727 - RNA, 17 nt, Artificial Sequence
  Synthetic
cucgggaauccuaaaaa

SEQ ID NO: 5728 - RNA, 17 nt, Artificial Sequence
  Synthetic
aguggaucggguguaaa

SEQ ID NO: 5729 - RNA, 17 nt, Artificial Sequence
  Synthetic
uuuuugagaucugguaa

SEQ ID NO: 5730 - RNA, 17 nt, Artificial Sequence
  Synthetic
gaggcuuaucuucacca

SEQ ID NO: 5731 - RNA, 17 nt, Artificial Sequence
  Synthetic
ugcagaagcguuuggca

SEQ ID NO: 5732 - RNA, 17 nt, Artificial Sequence
  Synthetic
uccaaaagcacauugcc

SEQ ID NO: 5733 - RNA, 17 nt, Artificial Sequence
  Synthetic
cuuggggcugguccugc

SEQ ID NO: 5734 - RNA, 17 nt, Artificial Sequence
  Synthetic
agagucucugucaccug

SEQ ID NO: 5735 - RNA, 17 nt, Artificial Sequence
  Synthetic
gaagaggcacagggcug

SEQ ID NO: 5736 - RNA, 17 nt, Artificial Sequence
  Synthetic
gggagcaggaaauaucu

SEQ ID NO: 5737 - RNA, 17 nt, Artificial Sequence
  Synthetic
acaccgaagcagaguuu

SEQ ID NO: 5738 - RNA, 20 nt, Artificial Sequence
  Synthetic
cuacucgggaauccuaaaaa

SEQ ID NO: 5739 - RNA, 20 nt, Artificial Sequence
  Synthetic
cccaguggaucggguguaaa

SEQ ID NO: 5740 - RNA, 20 nt, Artificial Sequence
  Synthetic
uucuuuuugagaucugguaa

SEQ ID NO: 5741 - RNA, 20 nt, Artificial Sequence
  Synthetic
ugugaggcuuaucuucacca

SEQ ID NO: 5742 - RNA, 20 nt, Artificial Sequence
  Synthetic
auuugcagaagcguuuggca

SEQ ID NO: 5743 - RNA, 20 nt, Artificial Sequence
  Synthetic
ucuuccaaaagcacauugcc

SEQ ID NO: 5744 - RNA, 20 nt, Artificial Sequence
  Synthetic
caucuuggggcugguccugc

SEQ ID NO: 5745 - RNA, 20 nt, Artificial Sequence
  Synthetic
ccaagagucucugucaccug

SEQ ID NO: 5746 - RNA, 20 nt, Artificial Sequence
  Synthetic
gaagaagaggcacagggcug

SEQ ID NO: 5747 - RNA, 20 nt, Artificial Sequence
  Synthetic
cuggggagcaggaaauaucu

SEQ ID NO: 5748 - RNA, 20 nt, Artificial Sequence
  Synthetic
ucgacaccgaagcagaguuu

SEQ ID NO: 5749 - RNA, 17 nt, Artificial Sequence
  Synthetic
acagggcucuauuuuau

SEQ ID NO: 5750 - RNA, 17 nt, Artificial Sequence
  Synthetic
uccuccugacaaucgau

SEQ ID NO: 5751 - RNA, 17 nt, Artificial Sequence
  Synthetic
accuaucgauugucagg

SEQ ID NO: 5752 - DNA, 30 bp, Artificial Sequence
  Synthetic
tatcaagtgtcaagtccaatctatgacatc

SEQ ID NO: 5753 - DNA, 29 bp, Artificial Sequence
  Synthetic
ggaaattcttccagaattgatactgactg

What is claimed is:

1. A CRISPR/Cas system, comprising:
a gRNA molecule comprising a targeting domain which is complementary with a target sequence of a C-C chemokine receptor type 5 (CCR5) gene; and
a Cas9 molecule.

2. The system of claim 1, wherein said system is configured to forma double strand break or a single strand break within 500 bp, 450 bp, 400 bp, 350 bp, 300 bp, 250 bp, 200 bp, 150 bp, 100 bp, 50 bp, 25 bp, or 10 bp of a CCR5 target position, thereby altering said CCR5 gene.

3. The system of claim 2, wherein said CCR5 target position is selected from the group consisting of CCR5 target knockout positions, CCR5 target knockdown positions, CCR5 target point positions, and CCR5 target hotspot mutations.

4. The system of claim 1, wherein said Cas9 molecule is selected from the group consisting of an enzymatically active Cas9 (eaCas9) molecule, an enzymatically inactive Cas9 (eiCas9) molecule, and an eiCas9 fusion protein.

5. The system of claim 4, wherein said eaCas9 molecule comprises HNH-like domain cleavage activity but has no, or no significant, N-terminal RuvC-like domain cleavage activity.

6. The system of claim 4, wherein said eaCas9 molecule is an HNH-like domain nickase.

7. The system of claim 4, wherein said eaCas9 molecule comprises a mutation at D10.

8. The system of claim 4, wherein said eaCas9 molecule comprises N-terminal RuvC-like domain cleavage activity but has no, or no significant, HNH-like domain cleavage activity.

9. The system of claim 4, wherein said eaCas9 molecule is an N-terminal RuvC-like domain nickase.

10. The system of claim 4, wherein said eaCas9 molecule comprises a mutation at H840 or N863.

11. The system of claim 4, wherein said eiCas9 fusion protein is an eiCas9-transcription repressor domain fusion.

12. The system of claim 1, wherein said Cas9 molecule is an S. aureus Cas9 molecule, an S. pyogenes Cas9 molecule, or a N. meningitidis Cas9 molecule.

13. The system of claim 2, wherein said altering said CCR5 gene comprises knocking out said CCR5 gene, or knocking down said CCR5 gene.

14. The system of claim 1, wherein said targeting domain is configured to target a coding region or a non-coding region of said CCR5 gene, wherein said non-coding region comprises a promoter region, an enhancer region, an intron, the 3′ UTR, the 5′ UTR, or a polyadenylation signal region of said CCR5 gene; and said coding region comprises an exon of said CCR5 gene.

15. The system of claim 1, wherein said targeting domain comprises or consists of a nucleotide sequence that is the same as, or differs by no more than 3 nucleotides from, a targeting domain sequence selected from the targeting domain sequences disclosed in Tables 1A-1F, 2A-2C, 3A-3E, 4A-4C, 5A-5C, 6A-6E, 7A-7C, and 18.

16. The system of claim 1, wherein said gRNA is a modular gRNA molecule or a chimeric gRNA molecule.

17. The system of claim 1, wherein said targeting domain has a length of 16, 17, 18, 19, 20, 21, 22, 23, 24, 25, or 26 nucleotides.

18. The system of claim 1, wherein said gRNA molecule comprises from 5′ to 3′:
a targeting domain;
a first complementarity domain;
a linking domain;
a second complementarity domain;
a proximal domain; and
a tail domain.

19. The system of claim 18, wherein said linking domain is no more than 25 nucleotides in length.

20. The system of claim 18, wherein said proximal and tail domain, taken together, are at least 20, at least 25, at least 30, or at least 40 nucleotides in length.

21. A cell transfected with the CRISPR/Cas system of claim 1.

22. A gRNA molecule comprising a targeting domain which is complementary with a target sequence of a CCR5 gene.

23. The gRNA molecule of claim 22, wherein said targeting domain comprises or consists of a nucleotide sequence that is the same as, or differs by no more than 3 nucleotides from, a targeting domain sequence selected from the targeting domain sequences disclosed in Tables 1A-1F, 2A-2C, 3A-3E, 4A-4C, 5A-5C, 6A-6E, 7A-7C, and 18.

24. A composition comprising the gRNA molecule of claim 22.

25. The composition of claim 24, further comprising a Cas9 molecule.

26. A nucleic acid composition that comprises: (a) a first nucleotide sequence that encodes a gRNA molecule comprising a targeting domain that is complementary with a target sequence of a CCR5 gene.

27. The nucleic acid composition of claim 26, further comprising: (b) a second nucleotide sequence that encodes a Cas9 molecule.

28. The nucleic acid of claim 27, wherein said Cas9 molecule is selected from the group consisting of an eaCas9 molecule, an eiCas9 molecule, and an eiCas9 fusion protein.

29. The nucleic acid of claim 27, wherein said Cas9 molecule is an S. aureus Cas9 molecule, an S. pyogenes Cas9 molecule, or a N. meningitidis Cas9 molecule.

30. The nucleic acid composition of claim 27, wherein (a) and (b) are present on one nucleic acid molecule; or (a) is present on a first nucleic acid molecule and (b) is present on a second nucleic acid molecule.

31. The nucleic acid composition of claim 30, wherein each of said nucleic acid molecule, said first nucleic acid molecule, and said second nucleic acid molecule is a DNA plasmid.

32. The nucleic acid composition of claim 26, further comprising: (c) a third nucleotide sequence that encodes a second gRNA molecule comprising a targeting domain that is complementary with a second target sequence of said CCR5 gene.

33. A cell transfected with the nucleic acid composition of claim 26.

34. A method of altering a CCR5 gene in a cell, comprising administering to said cell:
(i) a CRISPR/Cas system comprising: (a) a gRNA molecule comprising a targeting domain which is complementary with a target domain sequence of said CCR5 gene and (b) a Cas9 molecule; or
(ii) a nucleic acid composition that comprises: (a) a first nucleotide sequence encoding a gRNA molecule comprising a targeting domain that is complementary with a target sequence of a CCR5 gene and (b) a second nucleotide sequence encoding a Cas9 molecule.

35. The method of claim 34, wherein said alteration comprises knockout of said CCR5 gene or knockdown of said CCR5 gene.

36. The method of claim 35, wherein said knockout of said CCR5 gene comprises:
(a) insertion or deletion of one or more nucleotides in close proximity to or within the early coding region of said CCR5 gene, or
(b) deletion of a genomic sequence comprising at least a portion of said CCR5 gene.

37. The method of claim 35, wherein said alteration comprises knockdown of said CCR5 gene and said Cas9 molecule is an eiCas9 molecule or an eiCas9 fusion protein.

38. The method of claim 34, wherein said alteration of said CCR5 gene results in reduction or elimination of (a) expression of said CCR5 gene, (b) CCR5 protein function, and/or (c) level of CCR5 protein.

39. The method of claim 34, wherein said cell is from a subject suffering from or at risk for HIV infection or AIDS.

40. The method of claim 34, wherein said cell is selected from the group consisting of a stem cell, a progenitor cell, a T cell, a B cell, and a blood cell.

41. The method of claim 34, wherein said cell is a hematopoietic stem cell.
